(19) United States
(12) Patent Application Publication
(10) Pub. No.: US 2023/0233671 A1
(43) Pub. Date: Jul. 27, 2023

(54) RNA MOLECULES

(71) Applicant: Pfizer Inc., New York, NY (US)

(72) Inventors: Eric Matthew Bennett, Arlington, MA (US); Fernando Martin Diaz, New York, NY (US); Philip Ralph Dormitzer, Sherborn, MA (US); Kathrin Ute Jansen, New York, NY (US); Raquel Munoz-Moreno, Edgewater, NJ (US); Alicia Solorzano Quijano, New York, NY (US)

(21) Appl. No.: 18/045,967

(22) Filed: Oct. 12, 2022

Related U.S. Application Data
(60) Provisional application No. 63/373,539, filed on Aug. 25, 2022.
(60) Provisional application No. 63/293,220, filed on Dec. 23, 2021.
(60) Provisional application No. 63/256,283, filed on Oct. 15, 2021.

(51) Int. Cl. A61K 39/25; A61K 47/69; A61K 47/10; A61K 47/28; A61P 37/04

(52) U.S. Cl. CPC A61K 39/25; A61K 47/6929; A61K 47/10; A61K 47/28; A61P 37/04

(57) ABSTRACT

The present disclosure relates to RNA molecules encoding a varicella zoster virus (VZV). The present disclosure further relates to compositions comprising the RNA molecules formulated in a lipid nanoparticle (RNA-LNP). The present disclosure further relates to the use of the RNA molecules, RNA-LNPs and compositions for the treatment or prevention of herpes zoster or shingles.

### REFERENCE TO SEQUENCE LISTING

[0001] The instant application contains a sequence listing which has been submitted electronically in .xml format and is hereby incorporated by reference in its entirety. The .xml file, named “PC072772A_SequenceListing-v2.xml”, was created on Feb. 28, 2023, and is 791 KB in size.

### BACKGROUND

[0002] Varicella-zoster virus (VZV), also known as human herpesvirus 3 (HHV-3), is a human pathogen that causes varicella or chicken pox in children and re-emerges later as herpes zoster or shingles. Two vaccines have been developed and licensed in various countries to prevent herpes zoster. First is ZOSTAVAX® (Merck & Co., Inc., Kenilworth, N.J., USA), a live attenuated VZV vaccine. The US FDA approved ZOSTAVAX® in 2006, however as of November 2020 ZOSTAVAX® is no longer available in the US. Second is SHINGRIX® (GlaxoSmithKline, Rockville, Md., USA), an AS01_{B} adjuvanted VZV gE subunit protein vaccine. The US FDA approved SHINGRIX® in 2017.

[0003] In the US, approximately 1 million cases of shingles occur annually and approximately 30% of all people who have been infected with chickenpox will later develop shingles. The incidence of shingles continues to increase globally. Thus, in view of the high prevalence of shingles, there remains a need for improved vaccines for the prevention of shingles.

### SUMMARY

[0004] The present disclosure provides immunogenic compositions and methods for treating a subject comprising the administration of RNA molecules, e.g., immunogenic RNA polynucleotide encoding an amino acid sequence, e.g., an immunogenic antigen, comprising a varicella-zoster virus (VZV) protein, an immunogenic variant thereof, or an immunogenic fragment of the VZV protein or the immunogenic variant thereof, e.g., an antigenic peptide or protein. Thus, the immunogenic antigen comprises an epitope of a VZV protein for inducing an immune response against VZV, in the subject. RNA polynucleotide encoding an immunogenic antigen is administered to provide (following expression of the polynucleotide by appropriate target cells) antigen for induction, e.g., stimulation, priming, and/or expansion, of an immune response, e.g., antibodies and/or immune effector cells. In one aspect, the immune response to be induced according to the present disclosure is a B cell-mediated immune response, e.g., an antibody-mediated immune response. Additionally or alternatively, the immune response to be induced according to the present disclosure may be a T cell-mediated immune response. In one aspect, the immune response is an anti-VZV immune response.

[0005] The immunogenic compositions described herein comprise RNA molecules comprising RNA (as the active principle) that may be translated into a protein in a recipient's cells. In addition to wild type or codon-optimized sequences encoding the antigen sequence, the RNA molecules may contain one or more structural elements optimized for maximal efficacy of the RNA with respect to stability and translational efficiency (5′ cap, 5′ UTR, 3′ UTR, poly-A-tail). In one aspect, the RNA molecules contain all of these elements. In some aspects, each uridine of the RNA molecule is replaced by N1-methylpseudouridine (ψ) (e.g., modified RNA; modRNA). The RNA molecules described herein may be formulated with, encapsulated in, or complexed with lipids and/or proteins to generate RNA-particles (e.g., lipid nanoparticles (LNPs)) for administration. In one aspect, the RNA molecules described herein are formulated with, encapsulated in, or complexed with lipids to generate RNA-lipid nanoparticles (e.g. RNA-LNPs) for administration. In one aspect, the RNA molecules described herein are formulated with, encapsulated in, or complexed with proteins for administration. In one aspect, the RNA molecules described herein are formulated with, encapsulated in, complexed with lipids and proteins for administration. If a combination of different RNA molecules is used, the RNA molecules may be formulated together or formulated separately with lipids and/or proteins to generate RNA-particles for administration.

[0006] The present disclosure provides for RNA molecules and RNA-LNPs that include at least one open reading frame (ORF) encoding a VZV antigen. In some aspects, the VZV antigen is a VZV polypeptide. In some aspects, the VZV polypeptide is a VZV glycoprotein. In some aspects, the VZV glycoprotein is VZV gK, gN, gC, gB, gH, gM, gL gI or gE. In some aspects, the VZV glycoprotein is VZV gE. In some aspects, the VZV polypeptide is a full-length, truncated, fragment or variant thereof. In some aspects, the VZV polypeptide comprises at least one mutation.

[0007] The present disclosure provides for RNA molecules and RNA-LNPs that include at least one ORF encoding a VZV polypeptide of Table 1. In some aspects, the VZV polypeptide has, has at least, or has at most 90%, 91%, 92%, 93%, 94%, 95, 96%, 97%, 98% or 99% or higher identity to any of the amino acid sequences of Table 1, for example, any of SEQ ID NO: 1 to 11. In some aspects, the VZV polypeptide comprises an amino acid sequence selected from SEQ ID NO: 1 to 11. In some aspects, the VZV polypeptide consists of any of the amino acid sequences of Table 1, for example, any of SEQ ID NO: 1 to 11.

[0008] The present disclosure provides for RNA molecules and RNA-LNPs comprising at least one ORF transcribed from at least one DNA nucleic acid of Table 2. In some aspects, the RNA molecule comprises an ORF transcribed from a nucleic acid sequence that has, has at least, or has at most 90%, 91%, 92%, 93%, 94%, 95, 96%, 97%, 98% or 99% or higher identity to any of the nucleic acid sequences of Table 2, for example, any of SEQ ID NO: 12 to 145. In some aspects, the RNA molecule is transcribed from a nucleic acid sequence selected from SEQ ID NO: 12 to 145. In some aspects, the RNA molecule comprises an ORF transcribed from a nucleic acid sequence that consists of any of the nucleic acid sequences of Table 2, for example, any of SEQ ID NO: 12 to 145.

[0009] The present disclosure further provides for RNA molecules and RNA-LNPs comprising at least one ORF comprising an RNA nucleic acid sequence of Table 3. In some aspects, the RNA molecule comprises a nucleic acid sequence that has, has at least, or has at most 90%, 91%, 92%, 93%, 94%, 95, 96%, 97%, 98% or 99% or higher identity to any of the nucleic acid sequences of Table 3, for example, any of SEQ ID NO: 146 to 279. In some aspects, the RNA molecule comprises a nucleic acid sequence selected from SEQ ID NO: 146 to 279. In some aspects, the RNA molecule comprises a nucleic acid sequence that consists of any of the nucleic acid sequences of Table 3, for example, any of SEQ ID NO: 146 to 279. In some aspects, each uridine of any of SEQ ID NO: 146 to 279 is replaced by N1-methylpseudouridine (w) (e.g., modified RNA; modRNA).

[0010] The present disclosure further provides for RNA molecules and RNA-LNPs that include a 5′ untranslated region (5′-UTR) and/or a 3′ untranslated region (3′-UTR). In some aspects, the RNA molecule includes a 5′ untranslated region (5′-UTR). In some aspects, the 5′ UTR comprises a sequence selected from any of SEQ ID NO: 281 (SEQ ID NO: 280—DNA; SEQ ID NO: 282—RNA with ψ) and 312 to 313. In some aspects, the 5′ UTR comprises a sequence having at least 90%, 91%, 92%, 93%, 94%, 95, 96%, 97%, 98% or 99% or higher identity to any of SEQ ID NO: 281 and 312 to 313. In some aspects, the 5′ UTR comprises a sequence selected from any of SEQ ID NO: 281 and 312 to 313. In some aspects, the 5′ UTR comprises a sequence consisting of any of SEQ ID NO: 281 and 312 to 313.

[0011] In some aspects, the RNA molecules and RNA-LNPs include a 3′ untranslated region (3′-UTR). In some aspects, the 3′ UTR comprises a sequence selected from any of SEQ ID NO: 284 (SEQ ID NO: 283—DNA; SEQ ID NO: 285—RNA with ψ), 314 and 317 (SEQ ID NO: 318—RNA with ψ). In some aspects, the 3′ UTR comprises a sequence having at least 90%, 91%, 92%, 93%, 94%, 95, 96%, 97%, 98% or 99% or higher identity to any of SEQ ID NO: 284, 314 and 317. In some aspects, the 3′ UTR comprises a sequence selected from any of SEQ ID NO: 284, 314 and 317. In some aspects, the 3′ UTR comprises a sequence consisting of any of SEQ ID NO: 284, 314 and 317.

[0012] The present disclosure further provides for RNA molecules and RNA-LNPs that include a 5′ cap moiety. In some aspects, the 5′ cap moiety is (3′OMe)-m₂^{7,3′-O}Gppp (m₁^{2′-O})ApG. The present disclosure further provides for RNA molecules and RNA-LNPs that include a 3′ poly-A tail. In some aspects, the poly-A tail comprises a sequence selected from any of SEQ ID NO: 287 (SEQ ID NO: 286—DNA; SEQ ID NOs: 288—RNA with ψ) and 315 (SEQ ID NO: 316—RNA with ψ). In some aspects, the poly-A tail comprises a sequence selected from any of SEQ ID NO: 287 and 315+/−1 adenosine (A) or +/−2 adenosine (A).

[0013] In some aspects, the RNA molecule includes a 5′ UTR and 3′ UTR. In some aspects, the RNA molecule includes a 5′ cap, 5′ UTR, and 3′ UTR. In some aspects, the RNA molecule includes a 5′ cap, 5′ UTR, 3′ UTR, and poly-A tail. In some aspects, the RNA molecule includes a 5′ UTR, 3′ UTR, and poly-A tail. In some aspects, each uridine of any of the 5′ UTR, 3′ UTR, and poly-A tail is replaced by N1-methylpseudouridine (ψ) (e.g., modified RNA; modRNA).

[0014] The present disclosure provides for RNA molecules as described in Table 5. In some aspects, the RNA molecule comprises a 5′ UTR of SEQ ID NO: 281 or 312, a VZV ORF of SEQ ID NO: 146, a 3′ UTR of SEQ ID NO: 284 or 317 and/or a poly-A tail of SEQ ID NO: 287 or 315 (gE WT). In some aspects, the RNA molecule comprises a 5′ UTR of SEQ ID NO: 281 or 312, a VZV ORF of SEQ ID NO: 147, a 3′ UTR of SEQ ID NO: 284 or 317 and/or a poly-A tail of SEQ ID NO: 287 or 315 (gE WT CO1). In some aspects, the RNA molecule comprises a 5′ UTR of SEQ ID NO: 281 or 312, a VZV ORF of SEQ ID NO: 148, a 3′ UTR of SEQ ID NO: 284 or 317 and/or a poly-A tail of SEQ ID NO: 287 or 315 (gE WT CO2). In some aspects, the RNA molecule comprises a 5′ UTR of SEQ ID NO: 281 or 312, a VZV ORF of SEQ ID NO: 149, a 3′ UTR of SEQ ID NO: 284 or 317 and/or a poly-A tail of SEQ ID NO: 287 or 315 (ms3 CO1). In some aspects, the RNA molecule comprises a 5′ UTR of SEQ ID NO: 281 or 312, a VZV ORF of SEQ ID NO: 150, a 3′ UTR of SEQ ID NO: 284 or 317 and/or a poly-A tail of SEQ ID NO: 287 or 315 (ms3 CO2). In some aspects, the RNA molecule comprises a 5′ UTR of SEQ ID NO: 281 or 312, a VZV ORF of SEQ ID NO: 151, a 3′ UTR of SEQ ID NO: 284 or 317 and/or a poly-A tail of SEQ ID NO: 287 or 315 (ms4 CO1). In some aspects, the RNA molecule comprises a 5′ UTR of SEQ ID NO: 281 or 312, a VZV ORF of SEQ ID NO: 152, a 3′ UTR of SEQ ID NO: 284 or 317 and/or a poly-A tail of SEQ ID NO: 287 or 315 (ms4 CO2). In some aspects, the RNA molecule comprises a 5′ UTR of SEQ ID NO: 281 or 312, a VZV ORF of SEQ ID NO: 153, a 3′ UTR of SEQ ID NO: 284 or 317 and/or a poly-A tail of SEQ ID NO: 287 or 315 (ms5 CO1). In some aspects, the RNA molecule comprises a 5′ UTR of SEQ ID NO: 281 or 312, a VZV ORF of SEQ ID NO: 154, a 3′ UTR of SEQ ID NO: 284 or 317 and/or a poly-A tail of SEQ ID NO: 287 or 315 (ms5 CO2). In some aspects, the RNA molecule comprises a 5′ UTR of SEQ ID NO: 281 or 312, a VZV ORF of SEQ ID NO: 155, a 3′ UTR of SEQ ID NO: 284 or 317 and/or a poly-A tail of SEQ ID NO: 287 or 315 (ms5 CO2 v2). In some aspects, the RNA molecule comprises a 5′ UTR of SEQ ID NO: 281 or 312, a VZV ORF of SEQ ID NO: 156, a 3′ UTR of SEQ ID NO: 284 or 317 and/or a poly-A tail of SEQ ID NO: 287 or 315 (ms6 CO1). In some aspects, the RNA molecule comprises a 5′ UTR of SEQ ID NO: 281 or 312, a VZV ORF of SEQ ID NO: 157, a 3′ UTR of SEQ ID NO: 284 or 317 and/or a poly-A tail of SEQ ID NO: 287 or 315 (ms6 CO2). In some aspects, the RNA molecule comprises a 5′ UTR of SEQ ID NO: 281 or 312, a VZV ORF of SEQ ID NO: 158, a 3′ UTR of SEQ ID NO: 284 or 317 and/or a poly-A tail of SEQ ID NO: 287 or 315 (ms8 CO1). In some aspects, the RNA molecule comprises a 5′ UTR of SEQ ID NO: 281 or 312, a VZV ORF of SEQ ID NO: 159, a 3′ UTR of SEQ ID NO: 284 or 317 and/or a poly-A tail of SEQ ID NO: 287 or 315 (ms9 CO1). In some aspects, the RNA molecule comprises a 5′ UTR of SEQ ID NO: 281 or 312, a VZV ORF of SEQ ID NO: 160, a 3′ UTR of SEQ ID NO: 284 or 317 and/or a poly-A tail of SEQ ID NO: 287 or 315 (ms9 CO2). In some aspects, the RNA molecule comprises a 5′ UTR of SEQ ID NO: 281 or 312, a VZV ORF of SEQ ID NO: 161, a 3′ UTR of SEQ ID NO: 284 or 317 and/or a poly-A tail of SEQ ID NO: 287 or 315 (ms10 CO1). In some aspects, the RNA molecule comprises a 5′ UTR of SEQ ID NO: 281 or 312, a VZV ORF of SEQ ID NO: 162, a 3′ UTR of SEQ ID NO: 284 or 317 and/or a poly-A tail of SEQ ID NO: 287 or 315 (ms10 CO2). In some aspects, the RNA molecule comprises a 5′ UTR of SEQ ID NO: 281 or 312, a VZV ORF of SEQ ID NO: 163, a 3′ UTR of SEQ ID NO: 284 or 317 and/or a poly-A tail of SEQ ID NO: 287 or 315 (ms10 CO3). In some aspects, the RNA molecule comprises a 5′ UTR of SEQ ID NO: 281 or 312, a VZV ORF of SEQ ID NO: 164, a 3′ UTR of SEQ ID NO: 284 or 317 and/or a poly-A tail of SEQ ID NO: 287 or 315 (ms11 CO1). In some aspects, the RNA molecule comprises a 5′ UTR of SEQ ID NO: 281 or 312, a VZV ORF of SEQ ID NO: 165, a 3′ UTR of SEQ ID NO: 284 or 317 and/or a poly-A tail of SEQ ID NO: 287 or 315 (ms11 CO2). In some aspects, the RNA molecule comprises a 5′ UTR of SEQ ID NO: 281 or 312, a VZV ORF of SEQ ID NO: 166, a 3′ UTR of SEQ ID NO: 284 or 317 and/or a poly-A tail of SEQ ID NO: 287 or 315 (ms12 CO1). In some aspects, the RNA molecule comprises a 5′ UTR of SEQ ID NO: 281 or 312, a VZV ORF of SEQ ID NO: 167, a 3′ UTR of SEQ ID NO: 284 or 317 and/or a poly-A tail of SEQ ID NO: 287 or 315 (ms12 CO2). In some aspects, the RNA molecule comprises a 5′ UTR of SEQ ID NO: 281 or 312, a VZV ORF of SEQ ID NO: 168, a 3′ UTR of SEQ ID NO: 284 or 317 and/or a poly-A tail of SEQ ID NO: 287 or 315. In some aspects, the RNA molecule comprises a 5′ UTR of SEQ ID NO: 281 or 312, a VZV ORF of SEQ ID NO: 169, a 3′ UTR of SEQ ID NO: 284 or 317 and/or a poly-A tail of SEQ ID NO: 287 or 315. In some aspects, the RNA molecule comprises a 5′ UTR of SEQ ID NO: 281 or 312, a VZV ORF of SEQ ID NO: 170, a 3′ UTR of SEQ ID NO: 284 or 317 and/or a poly-A tail of SEQ ID NO: 287 or 315. In some aspects, the RNA molecule comprises a 5′ UTR of SEQ ID NO: 281 or 312, a VZV ORF of SEQ ID NO: 171, a 3′ UTR of SEQ ID NO: 284 or 317 and/or a poly-A tail of SEQ ID NO: 287 or 315. In some aspects, the RNA molecule comprises a 5′ UTR of SEQ ID NO: 281 or 312, a VZV ORF of SEQ ID NO: 172, a 3′ UTR of SEQ ID NO: 284 or 317 and/or a poly-A tail of SEQ ID NO: 287 or 315. In some aspects, the RNA molecule comprises a 5′ UTR of SEQ ID NO: 281 or 312, a VZV ORF of SEQ ID NO: 173, a 3′ UTR of SEQ ID NO: 284 or 317 and/or a poly-A tail of SEQ ID NO: 287 or 315. In some aspects, the RNA molecule comprises a 5′ UTR of SEQ ID NO: 281 or 312, a VZV ORF of SEQ ID NO: 174, a 3′ UTR of SEQ ID NO: 284 or 317 and/or a poly-A tail of SEQ ID NO: 287 or 315. In some aspects, the RNA molecule comprises a 5′ UTR of SEQ ID NO: 281 or 312, a VZV ORF any one of SEQ ID NO: 175 to 238, a 3′ UTR of SEQ ID NO: 284 or 317 and/or a poly-A tail of SEQ ID NO: 287 or 315. In some aspects, the RNA molecule comprises a 5′ UTR of SEQ ID NO: 281 or 312, a VZV ORF of SEQ ID NO: 239, a 3′ UTR of SEQ ID NO: 284 or 317 and/or a poly-A tail of SEQ ID NO: 287 or 315. In some aspects, the RNA molecule comprises a 5′ UTR of SEQ ID NO: 281 or 312, a VZV ORF any one of SEQ ID NO: 240 to 254, a 3′ UTR of SEQ ID NO: 284 or 317 and/or a poly-A tail of SEQ ID NO: 287 or 315. In some aspects, the RNA molecule comprises a 5′ UTR of SEQ ID NO: 281 or 312, a VZV ORF any one of SEQ ID NO: 255 to 267, a 3′ UTR of SEQ ID NO: 284 or 317 and/or a poly-A tail of SEQ ID NO: 287 or 315. In some aspects, the RNA molecule comprises a 5′ UTR of SEQ ID NO: 281 or 312, a VZV ORF any one of SEQ ID NO: 268 to 279, a 3′ UTR of SEQ ID NO: 284 or 317 and/or a poly-A tail of SEQ ID NO: 287 or 315. In some aspects, the VZV ORF further comprises a stop codon described herein. In some aspects, the poly-A tail length may contain +1/−1 A or +2/−2 A. In some aspects, each uridine of the RNA molecule is replaced by N1-methylpseudouridine (ψ) (e.g., modified RNA; modRNA).

[0015] The present disclosure further provides for RNA molecules that include at least one open reading frame that was generated from codon-optimized DNA. In some aspects, the open reading frame comprises a G/C content of at least 55%, at least 60%, at least 65%, at least 70%, at least 75%, about 50% to 75%, or about 55% to 70%. In some aspects, the G/C content is about 58%, is about 66%, or about 62%. The present disclosure further provides for RNA molecules that encode VZV polypeptides that localizes in the cellular membrane, localizes in the Golgi and/or are anchored in the membrane and are secreted. The present disclosure further provides RNA molecules comprising stabilized RNA. The present disclosure further provides for RNA molecules that include RNA having at least one modified nucleotide (e.g., modified RNA; modRNA). In some aspects, the modified nucleotide is pseudouridine, N1-methylpseudouridine, N1-ethylpseudouridine, 2-thiouridine, 4′-thiouridine, 5-methylcytosine, 5-methyluridine, 2-thio-1-methyl-1-deaza-pseudouridine, 2-thio-1-methyl-pseudouridine, 2-thio-5-aza-uridine, 2-thio-dihydropseudouridine, 2-thio-dihydrouridine, 2-thio-pseudouridine, 4-methoxy-2-thio-pseudouridine, 4-methoxy-pseudouridine, 4-thio-1-methyl-pseudouridine, 4-thio-pseudouridine, 5-aza-uridine, dihydropseudouridine, 5-methoxyuridine or 2′-O-methyl uridine. In some aspects, the modified nucleotide is N1-methylpseudouridine (w).

[0016] The present disclosure further provides for RNA molecules that are messenger-RNA (mRNA) or self-replicating RNA. In some aspects, the RNA is a mRNA.

[0017] The present disclosure further provides for immunogenic compositions including the RNA molecules described herein. The RNA molecules may be formulated in, encapsulated in, complex with, bound to or adsorbed on a lipid nanoparticle (LNP) (e.g., VZV RNA-LNPs) in such immunogenic compositions. In some aspects, lipid nanoparticle includes at least one of a cationic lipid, a PEGylated lipid, and at least one structural lipid (e.g., a neutral lipid and a steroid or steroid analog).

[0018] In some aspects, the lipid nanoparticle includes a cationic lipid. In some aspects, the cationic lipid is (4-hydroxybutyl)azanediyl)bis(hexane-6,1-diyl)bis(2-hexyldecanoate) (ALC-0315).

[0019] In some aspects, lipid nanoparticle includes a polymer conjugated lipid. In some aspects, lipid nanoparticle includes a PEGylated lipid, also referred to PEG-lipid. In some aspects, the PEGylated lipid is PEG-modified phosphatidylethanolamine, PEG-modified phosphatidic acid, PEG-modified ceramides (e.g. PEG-CerC14 or PEG-CerC20), PEG-modified dialkylamines, PEG-modified diacylglycerols, PEG-modified dialkylglycerols, 2-[(polyethylene glycol)-2000]-N,N-ditetradecylacetamide, glycol-lipids including PEG-c-DOMG, PEG-c-DMA, PEG-s-DMG, N-[(methoxy polyethylene glycol)2000)carbamyl]-1,2-dimyristyloxlpropyl-3-amine (PEG-c-DMA), and PEG-2000-DMG, PEGylated diacylglycerol (PEG-DAG) such as 1-(monomethoxy-polyethyleneglycol)-2,3-dimyristoylglycerol (PEG-DMG), a PEGylated phosphatidylethanoloamine (PEG-PE), a PEG succinate diacylglycerol (PEG-S-DAG) such as 4-O-(2′,3′-di(tetradecanoyloxy)propyl-1-O-((o-methoxy(polyethoxy)ethyl)butanedioate (PEG-S-DMG), a PEGylated ceramide (PEG-cer), or a PEG dialkoxypropylcarbamate such as co-methoxy(polyethoxy)ethyl-N-(2,3di(tetradecanoxy)propyl)carbamate or 2,3-di(tetradecanoxy)propyl-N-(u>-methoxy(polyethoxy)ethyl)carbamate. In some aspects, the PEGylated lipid is 2-[(polyethylene glycol)-2000]-N,N-ditetradecylacetamide (ALC-0159).

[0020] In some aspects, lipid nanoparticle includes at least one structural lipid, such as a neutral lipid. In some aspects, the neutral lipid is selected from 1,2-distearoyl-sn-glycero-3-phosphocholine (DSPC), distearoylphosphatidylcholine (DSPC), dioleoylphosphatidylcholine (DOPC), dipalmitoylphosphatidylcholine (DPPC), dioleoylphosphatidylglycerol (DOPG), dipalmitoylphosphatidylglycerol (DPPG), dioleoyl-phosphatidylethanolamine (DOPE), palmitoyloleoylphosphatidylcholine (POPC), palmitoyloleoyl-phosphatidylethanolamine (POPE) and dioleoyl-phosphatidylethanolamine 4-(N-maleimidomethyl)-cyclohexane-1 carboxylate (DOPE-mal), dipalmitoyl phosphatidyl ethanolamine (DPPE), dimyristoylphosphoethanolamine (DMPE), distearoyl-phosphatidylethanolamine (DSPE), 16-O-monomethyl PE, 16-O-dimethyl PE, 18-1-trans PE, 1-stearioyl-2-oleoylphosphatidyethanol amine (SOPE), and/or 1,2-dielaidoyl-sn-glycero-3-phophoethanolamine (transDOPE). In some aspects, the neutral lipid is 1,2-distearoyl-sn-glycero-3-phosphocholine (DSPC).

[0021] In some aspects, the lipid nanoparticle includes a second structural lipid, such as a steroid or steroid analog. In some aspects, the steroid or steroid analog is cholesterol.

[0022] In some aspects, the lipid nanoparticle has a mean diameter of about 1 to about 500 nm.

[0023] In some aspects, the RNA-LNP immunogenic composition is a liquid RNA-LNP composition comprising a RNA molecule/polynucleotide encoding a VZV polypeptide as disclosed herein at a concentration of at least, at most, exactly, or between any two of 0.01, 0.15, 0.30, 0.45, 0.60, 0.75, or 0.90 mg/mL, preferably about 0.01 to 0.09 mg/mL, encapsulated in LNPs with a lipid composition comprising a cationic lipid at a concentration of about 0.8 to 0.95 mg/mL, a PEGylated lipid at a concentration of about 0.05 to 0.15 mg/mL, a first structural lipid at a concentration of about 0.1 to 0.25 mg/mL, and a second structural lipid at a concentration of about 0.3 to 0.45 mg/mL. In some aspects, the liquid composition further comprises a buffer composition comprising a first buffer at a concentration of about 0.15 to 0.3 mg/mL, a second buffer at a concentration of about 1.25 to 1.4 mg/mL, and a stabilizing agent at a concentration of about 95 to 110 mg/mL.

[0024] In specific aspects, the liquid RNA-LNP immunogenic composition comprises a RNA molecule/polynucleotide encoding a VZV polypeptide as disclosed herein at a concentration of at least, at most, exactly, or between any two of 0.01, 0.15, 0.30, 0.45, 0.60, 0.75, or 0.90 mg/mL, preferably about 0.01 to 0.09 mg/mL, encapsulated in LNPs with a lipid composition comprising ((4-hydroxybutyl)azanediyl)bis(hexane-6,1-diyl)bis(2-hexyldecanoate) (ALC-0315) at a concentration of about 0.8 to 0.95 mg/mL, 2-[(polyethylene glycol)-2000]-N,N-ditetradecylacetamide (ALC-0159) at a concentration of about 0.05 to 0.15 mg/mL, 1,2-Distearoyl-sn-glycero-3-phosphocholine (DSPC) at a concentration of about 0.1 to 0.25 mg/mL, and cholesterol at a concentration of about 0.3 to 0.45 mg/mL. In some aspects, the liquid composition further comprises a Tris buffer composition comprising tromethamine at a concentration of about 0.1 to 0.3 mg/mL and Tris hydrochloride (HCl) at a concentration of about 1.25 to 1.4 mg/mL, and sucrose at a concentration of about 95 to 110 mg/mL.

[0025] In some aspects, the liquid RNA-LNP immunogenic composition comprises a RNA molecule/polynucleotide encoding a VZV polypeptide as disclosed herein at a concentration of at least, at most, exactly, or between any two of 0.01, 0.15, 0.30, 0.45, 0.60, 0.75, or 0.90 mg/mL, preferably about 0.01 to 0.09 mg/mL, encapsulated in a LNP, and further comprising about 5 to 15 mM Tris buffer, 200 to 400 mM sucrose at a pH of about 7.0 to 8.0.

[0026] In some aspects, the RNA-LNP immunogenic composition is a lyophilized (reconstituted) RNA-LNP composition comprising a RNA molecule/polynucleotide encoding a VZV polypeptide as disclosed herein at a concentration of at least, at most, exactly, or between any two of 0.01, 0.15, 0.30, 0.45, 0.60, 0.75, or 0.90 mg/mL, preferably about 0.01 to 0.09 mg/mL, encapsulated in LNPs with a lipid composition comprising a cationic lipid at a concentration of about 0.8 to 0.95 mg/mL, a PEGylated lipid at a concentration of about 0.05 to 0.15 mg/mL, a first structural lipid at a concentration of about 0.1 to 0.25 mg/mL, and a second structural lipid at a concentration of about 0.3 to 0.45 mg/mL. In some aspects, the lyophilized composition further comprises a first buffer at a concentration of about 0.01 and 0.15 mg/mL, a second buffer at a concentration of about 0.5 and 0.65 mg/mL, a stabilizing agent at a concentration of about 35 to 50 mg/mL, and a salt diluent at a concentration of about 5 to 15 mg/mL for reconstitution. In specific aspects, the lyophilized compositions are reconstituted in about 0.6 to 0.75 mL of the salt diluent. Concentrations in the lyophilized RNA-LNP composition are determined post-reconstitution.

[0027] In specific aspects, a lyophilized (reconstituted) RNA-LNP composition comprises a RNA polynucleotide encoding a VZV polypeptide as disclosed herein at a concentration of at least, at most, exactly, or between any two of 0.01, 0.15, 0.30, 0.45, 0.60, 0.75, or 0.90 mg/mL, preferably about 0.01 to 0.09 mg/mL, encapsulated in LNPs with a lipid composition of ALC-0315 at a concentration of about 0.8 to 0.95 mg/mL, ALC-0159 at a concentration of about 0.05 to 0.15 mg/mL, DSPC at a concentration of about 0.1 to 0.25 mg/mL, and cholesterol at a concentration of about 0.3 to 0.45 mg/mL, and further comprises a Tris buffer composition comprising tromethamine at a concentration of about 0.01 and 0.15 mg/mL and Tris HCl at a concentration of about 0.5 and 0.65 mg/mL, sucrose at a concentration of about 35 to 50 mg/mL, and sodium chloride (NaCl) diluent at a concentration of about 5 to 15 mg/mL for reconstitution. In specific aspects, the lyophilized compositions are reconstituted in about 0.6 to 0.75 mL of sodium chloride. Concentrations in the lyophilized RNA-LNP composition are determined post-reconstitution.

[0028] The present disclosure provides for RNA molecules, RNA-LNPs and immunogenic compositions that may be administered to a subject at a dose of at least, at most, exactly, or between any two of 1 μg, 15 μg, 30 μg, 45 μg, 60 μg, 75 μg, 90 μg, 100 μg or higher per administration of VZV RNA encapsulated in LNP.

[0029] The present disclosure provides for RNA molecules, RNA-LNPs and immunogenic compositions that may be administered in a single dose. The present disclosure further provides for RNA molecules, RNA-LNPs and immunogenic compositions that may be administered twice (e.g., Day 0 and about Day 7, Day 0 and about Day 14, Day 0 and about Day 21, Day 0 and about Day 28, Day 0 and about Day 60, Day 0 and about Day 90, Day 0 and about Day 120, Day 0 and about Day 150, Day 0 and about Day 180, Day 0 and about 1 month later, Day 0 and about 2 months later, Day 0 and about 3 months later, Day 0 and about 6 months later, Day 0 and about 9 months later, Day 0 and about 12 months later, Day 0 and about 18 months later, Day 0 and about 2 years later, Day 0 and about 5 years later, or Day 0 and about 10 years later). The present disclosure further provides for RNA molecules, RNA-LNPs and immunogenic compositions that may be administered twice at Day 0 and about 2 months later. The present disclosure further provides for RNA molecules, RNA-LNPs and immunogenic compositions that may be administered twice at Day 0 and about 6 months later. The present disclosure further provides for RNA molecules, RNA-LNPs and immunogenic compositions that may be administered three, four, five, six, seven, eight, nine, ten, eleven, twelve, thirteen, fourteen, or more administrations. In some aspects, periodic boosters at intervals of 1-5 years may be desirable to maintain protective levels of the antibodies. The present disclosure further provides for administration of a at least one booster dose.

[0030] The present disclosure provides for a method of inducing an immune response against VZV in a subject, including administering to the subject an effective amount of an RNA molecule, RNA-LNP and/or immunogenic composition described herein. The present disclosure further provides for the use of an RNA molecule, RNA-LNP and/or immunogenic composition described herein in the manufacture of a medicament for use in inducing an immune response against VZV in a subject.

[0031] The present disclosure provides for a method of inducing an immune response against VZV in a subject, including administering to the subject an effective amount of an RNA molecule and/or RNA-LNP that includes at least one open reading frame encoding a VZV polypeptide or composition described herein. The present disclosure further provides for the use of an RNA molecule and/or RNA-LNP that includes at least one open reading frame encoding a VZV polypeptide or composition described herein in the manufacture of a medicament for use in inducing an immune response against VZV in a subject.

[0032] The present disclosure provides for a method of inducing an immune response against VZV in a subject, including administering to the subject an effective amount of an RNA molecule and/or RNA-LNP that includes at least one open reading frame encoding a polypeptide of a gene of interest or composition described herein. The present disclosure further provides for the use of an RNA molecule and/or RNA-LNP that includes at least one open reading frame encoding a polypeptide of a gene of interest or composition described herein in the manufacture of a medicament for use in inducing an immune response against VZV in a subject.

[0033] The present disclosure provides for a method of preventing, treating or ameliorating an infection, disease or condition in a subject, including administering to a subject an effective amount of an RNA molecule, RNA-LNP and/or immunogenic composition described herein. The present disclosure further provides for the use of an RNA molecule RNA-LNP and/or immunogenic composition described herein in the manufacture of a medicament for use in preventing, treating or ameliorating an infection, disease or condition in a subject. In some aspects, the infection, disease or condition is associated with VZV. In some aspects, the infection, disease or condition is herpes zoster (shingles). In some aspects, the infection, disease or condition is postherpetic neuralgia.

[0034] The present disclosure provides for a method of preventing, treating or ameliorating an infection, disease or condition in a subject, including administering to a subject an effective amount of an RNA molecule and/or RNA-LNP that includes at least one open reading frame encoding a VZV polypeptide or immunogenic composition described herein. The present disclosure further provides for the use of an RNA molecule and/or RNA-LNP that includes at least one open reading frame encoding a VZV polypeptide or immunogenic composition described herein in the manufacture of a medicament for use in preventing, treating or ameliorating an infection, disease or condition in a subject. In some aspects, the infection, disease or condition is associated with VZV. In some aspects, the infection, disease or condition is herpes zoster or shingles. In some aspects, the infection, disease or condition is postherpetic neuralgia.

[0035] The present disclosure further provides for a method of preventing, treating or ameliorating an infection, disease or condition in a subject, including administering to a subject an effective amount of RNA molecules and/or RNA-LNPs that include at least one open reading frame encoding a polypeptide of a gene of interest or immunogenic compositions described herein. The present disclosure further provides for the use of RNA molecules and/or RNA-LNPs that include at least one open reading frame encoding a polypeptide of a gene of interest or immunogenic compositions described herein in the manufacture of a medicament for use in preventing, treating or ameliorating an infection, disease or condition in a subject. In some aspects, the infection, disease or condition is associated with the gene of interest.

[0036] In some aspects, the subject is, is at least, or is at most less than about 1 year of age, about 1 year of age or older, about 5 years of age or older, about 10 years of age or older, about 20 years of age or older, about 30 years of age or older, about 40 years of age or older, about 50 years of age or older, about 60 years of age or older, about 70 years of age or older, or older. In some aspects, the subject the subject is about 50 years of age or older.

[0037] In some aspects, the subject is immunocompetent. In some aspects, the subject is immunocompromised.

[0038] The present disclosure provides for a method or use described herein, wherein the RNA molecule, RNA-LNP and/or immunogenic composition is administered as a vaccine.

[0039] The present disclosure provides a method or use described herein, wherein the RNA molecule, RNA-LNP and/or immunogenic composition is administered by intradermal or intramuscular injection.

[0040] It is contemplated that any aspect discussed in this specification may be implemented with respect to any method or composition of the disclosure, and vice versa. Furthermore, compositions of the disclosure may be used to achieve methods of the disclosure.

[0041] Other objects, features and advantages of the present disclosure will become apparent from the following detailed description. It should be understood, however, that the detailed description and the specific examples, while indicating specific aspects of the disclosure, are given by way of illustration only, since various changes and modifications within the spirit and scope of the disclosure will become apparent to those skilled in the art from this detailed description.

### BRIEF DESCRIPTION OF THE DRAWINGS

[0042] FIG. 1 schematically illustrates wild-type (WT) varicella-zoster virus (VZV) gE protein (gE WT) and variant VZV gE proteins, where SP refers to a signal peptide sequence, ectodomain refers to a peptide sequence corresponding to the portion of the protein that extends into the extracellular space, TM refers to a transmembrane peptide sequence corresponding to the portion of the protein that spans the cell membrane, and CT refers to a cytoplasmic tail peptide sequence corresponding to the portion of the protein that extends into the cell cytoplasm. Variant VZV gE proteins having cytoplasmic tail modifications are designated ms4, ms5, ms8, ms9, ms10, ms11, and ms12. Secreted variant VZV gE proteins having TM modifications are designated ms3 and ms6. VZV gE RNA constructs encoding the VZV gE proteins were generated from codon-optimized (CO) DNA, where CO1 indicates CO constructs with about 58% G/C content, CO2 indicates CO constructs with about 66% G/C content, and CO3 indicates CO constructs with about 62% G/C content.

[0043] FIG. 2 shows VZV gE expression by Vero cells transfected with 10 ng, 25 ng, or 50 ng of VZV RNA constructs, including WT constructs (gE_WT CO1 and gE_WT CO2) and constructs having modifications in the cytoplasmic tail (CT) (ms4, ms5, ms8, ms9, ms10, ms11, and ms12; CO1 and CO2 for each). Cells were imaged for VZV gE expression, and the percentage of VZV gE⁺ transfected Vero cells is shown for each VZV RNA construct.

[0044] FIG. 3 shows VZV gE expression by Vero cells transfected with 10 ng, 25 ng, or 50 ng of the VZV RNA constructs having modifications in the transmembrane (TM) (secreted) (ms3 and ms6; CO1 and CO2 for each). Cells were imaged for VZV gE expression, and the percentage of VZV gE⁺ transfected Vero cells is shown for each VZV RNA construct.

[0045] FIG. 4 shows the mean fluorescence intensity (MFI) of Vero cells transfected with 10 ng, 25 ng, or 50 ng of the VZV RNA constructs, including WT constructs (gE_WT CO1 and gE_WT CO2) and constructs having modifications in the cytoplasmic tail (CT) (ms4, ms5, ms8, ms9, ms10, ms11, and ms12; CO1 and CO2 for each).

[0046] FIG. 5 shows the mean fluorescence intensity (MFI) of Vero cells transfected with 10 ng, 25 ng, or 50 ng of the VZV RNA constructs having modifications in the transmembrane (TM) (secreted) (ms3 and ms6; CO1 and CO2 for each).

[0047] FIG. 6 shows the subcellular localization at 63× magnification of VZV gE in Vero cells transfected with 50 ng of gE WT VZV RNA constructs and variant VZV gE RNA constructs (ms4, ms5, ms8) having cytoplasmic tail modifications.

[0048] FIG. 7 shows the subcellular localization at 63× magnification of VZV gE in Vero cells transfected with 50 ng of variant VZV gE RNA constructs (ms9, ms11, and ms12) having cytoplasmic tail modifications.

[0049] FIG. 8 shows the subcellular localization at 63× magnification of VZV gE in Vero cells transfected with 50 ng of variant VZV gE RNA constructs (ms10) having cytoplasmic tail modifications.

[0050] FIG. 9 shows the subcellular localization at 63× magnification of VZV gE in Vero cells transfected with 50 ng variant VZV gE RNA constructs (ms3 and ms6) having TM modifications (secreted).

[0051] FIG. 10 shows the subcellular localization at 10× magnification of VZV gE in Vero cells transfected with 25 ng of gE WT VZV RNA constructs and variant VZV gE RNA (ms4, ms5, ms8) having cytoplasmic tail modifications.

[0052] FIG. 11 shows the subcellular localization at 10× magnification of VZV gE in Vero cells transfected with 25 ng of variant VZV gE RNA constructs (ms9, ms11, ms12) having cytoplasmic tail modifications.

[0053] FIG. 12 shows the subcellular localization at 10× magnification of VZV gE in Vero cells transfected with 25 ng of variant VZV gE RNA constructs (ms10) having cytoplasmic tail modifications.

[0054] FIG. 13 shows the subcellular localization at 10× magnification of VZV gE in Vero cells transfected with 25 ng of variant VZV gE RNA constructs (ms3 and ms6) having TM modifications (secreted).

[0055] FIG. 14 shows a titration curve created by plotting input RNA quantities against the percentage of VZV gE-expressing human embryonic kidney (HEK) 293T cells, where the titration curve is used to determine the EC₅₀ of VZV RNA-LNP vaccines formulated with a VZV gE WT RNA construct (gE WT CO1 and gE WT CO2), a variant VZV gE RNA construct having cytoplasmic tail modifications (ms4 CO1) and a variant VZV gE RNA construct having transmembrane (TM) modifications (ms3 CO1) (secreted).

[0056] FIG. 15 shows a titration curve created by plotting input RNA quantities against the percentage of VZV gE-expressing human embryonic kidney (HEK) 293T cells, where the titration curve is used to determine the EC₅₀ of VZV RNA-LNP vaccines formulated with a VZV gE WT RNA construct (gE WT CO1 and gE WT CO2), a variant VZV gE RNA construct having cytoplasmic tail modifications (ms5 CO1) and a variant VZV gE RNA construct having TM modifications (ms6 CO2) (secreted).

[0057] FIG. 16 shows serum IgG levels in mice on Day 28 after immunization on Day 0 with a priming dose of: 1 μg, 2.5 μg, or 5 μg of SHINGRIX®; 0.5 μg or 1 μg of a VZV RNA-LNP vaccine formulated with gE_WT CO1 RNA construct; 0.5 μg of a VZV RNA-LNP vaccine formulated with ms3 CO1 RNA construct having TM modifications (secreted); 0.5 μg of a VZV RNA-LNP vaccine formulated with ms4 CO1 RNA construct having cytoplasmic tail modifications; 0.5 μg of a VZV RNA-LNP vaccine formulated with gE_WT CO2 RNA construct; or 0.5 μg or 1 μg of a lyophilized VZV RNA-LNP vaccine formulated with gE_WT CO1 RNA construct (gE_WT CO1 LYO).

[0058] FIG. 17 shows serum IgG levels in mice on Day 34 after immunization on Day 0 with a priming dose and immunization on Day 28 with a booster dose of: 1 μg, 2.5 μg, or 5 μg of SHINGRIX®; 0.5 μg or 1 μg of a VZV RNA-LNP vaccine formulated with gE_WT CO1 RNA construct; 0.5 μg of a VZV RNA-LNP vaccine formulated with ms3 CO1 RNA construct having TM modifications (secreted); 0.5 μg of a VZV RNA-LNP vaccine formulated with ms4 CO1 RNA construct having cytoplasmic tail modifications; 0.5 μg of a VZV RNA-LNP vaccine formulated with gE_WT CO2 RNA construct; or 0.5 μg or 1 μg of a lyophilized VZV RNA-LNP vaccine formulated with gE_WT CO1 RNA construct (gE_WT CO1 LYO).

[0059] FIG. 18 shows serum IgG levels in mice on Day 42 after immunization on Day 0 with a priming dose and immunization on Day 28 with a booster dose of: 1 μg, 2.5 μg, or 5 μg of SHINGRIX®; 0.5 μg or 1 μg of a VZV RNA-LNP vaccine formulated with gE_WT CO1 RNA construct; 0.5 μg of a VZV RNA-LNP vaccine formulated with ms3 CO1 RNA construct having TM modifications (secreted); 0.5 μg of a VZV RNA-LNP vaccine formulated with ms4 CO1 RNA construct having cytoplasmic tail modifications; 0.5 μg of a VZV RNA-LNP vaccine formulated with gE_WT CO2 RNA construct; or 0.5 μg or 1 μg of a lyophilized VZV RNA-LNP vaccine formulated with gE_WT CO1 RNA construct (gE_WT CO1 LYO).

[0060] FIG. 19 shows a comparison of serum IgG levels in mice on Day 28 (priming dose only), Day 34 (six days after booster dose), and Day 42 (two weeks after booster dose) after immunization on Day 0 with a priming dose and immunization on Day 28 with a booster dose of SHINGRIX® (1 μg) or a VZV RNA-LNP vaccine (0.5 μg).

[0061] FIG. 20 shows the percentage of CD4⁺ IFN-γ⁺-staining T cells following ex vivo stimulation of splenocytes harvested from mice on Day 34 after immunization on Day 0 with a priming dose and immunization on Day 28 with a booster dose of SHINGRIX® (1 μg, 2.5 μg, or 5 μg) or a VZV RNA-LNP vaccine (0.5 μg and/or 1 μg).

[0062] FIG. 21 shows the percentage of CD8⁺ IFN-γ⁺-staining T cells following ex vivo stimulation of splenocytes harvested from mice on Day 34 after immunization on Day 0 with a priming dose and immunization on Day 28 with a booster dose of SHINGRIX® (1 μg, 2.5 μg, or 5 μg) or a VZV RNA-LNP vaccine (0.5 μg and/or 1 μg).

[0063] FIG. 22 shows serum IgG levels in mice on Day 35 after a subcutaneous vaccination with 1350 pfu live-attenuated varicella (LAV) on Day 0.

[0064] FIG. 23 shows serum IgG levels in mice on Day 63 (1 month post dose 1) after vaccination with LAV vaccine on Day 0 and immunization on Day 35 with a dose of SHINGRIX® (5 μg, 2.5 μg or 1 μg); VZV RNA-LNP vaccine formulated with gE_WT CO2 RNA construct (1 μg or 0.5 μg); VZV RNA-LNP vaccine formulated with ms5 CO1 RNA construct having cytoplasmic tail modifications (1 μg or 0.5 μg); or VZV RNA-LNP vaccine formulated with ms6 CO2 RNA construct having TM modifications (secreted) (1 μg or 0.5 μg).

[0065] FIG. 24 shows serum IgG levels in mice on Day 76 (13 days post dose 2/boost) after vaccination with LAV vaccine on Day 0 and immunization on Day 35 and Day 63 with a dose of SHINGRIX® (5 μg, 2.5 μg or 1 μg); VZV RNA-LNP vaccine formulated with gE_WT CO2 RNA construct (1 μg or 0.5 μg); VZV RNA-LNP vaccine formulated with ms5 CO1 RNA construct having cytoplasmic tail modifications (1 μg or 0.5 μg); or VZV RNA-LNP vaccine formulated with ms6 CO2 RNA construct having TM modifications (secreted) (1 μg or 0.5 μg).

[0066] FIG. 25 shows serum IgG levels in mice on Day 63 (1 month post dose 1) after vaccination with LAV vaccine on Day 0 and immunization on Day 35 with a dose of VZV RNA-LNP vaccine formulated with gE_WT CO2 RNA construct (1 μg or 0.5 μg) or lyophilized VZV RNA-LNP vaccine formulated with gE_WT CO2 RNA construct (gE_WT CO2 lyo) (1 μg or 0.5 μg); and on Day 76 (13 days post dose 2/boost) after vaccination with LAV vaccine on Day 0 and immunization on Day 35 and Day 63 with a dose of VZV RNA-LNP vaccine formulated with gE_WT CO2 (1 μg or 0.5 μg) or lyophilized VZV RNA-LNP vaccine formulated with gE_WT CO2 RNA construct (gE_WT CO2 lyo) (1 μg or 0.5 μg).

[0067] FIGS. 26A-26D show the VZV gE-specific T cell and B cell responses induced by vaccines in splenocytes collected on Day 48 (13 days post dose 1) in LAV-experienced mice immunized at Day 35 with a dose of SHINGRIX® (5 μg or 1 μg); VZV RNA-LNP vaccine formulated with gE_WT CO2 RNA construct (1 μg or 0.5 μg); VZV RNA-LNP vaccine formulated with ms5 CO1 RNA construct having cytoplasmic tail modifications (1 μg); VZV RNA-LNP vaccine formulated with ms6 CO2 RNA construct having TM modifications (1 μg); or lyophilized VZV RNA-LNP vaccine formulated with gE_WT CO2 (gE_WT CO2 Lyo) (1 μg). FIG. 26A shows ELISpot measured number of VZV gE-specific cells secreting IFN-γ and results are expressed as spot forming cells (SFC) per million cells. FIG. 26B shows ICS assay measured IFN-γ-expressing cells within CD4⁺ T cells expressed as percentage of IFN-γ⁺ cells within CD4⁺ T cells. FIG. 26C shows ICS assay measured IFN-γ-expressing cells within CD8⁺ T cells expressed as percentage of IFN-γ⁺ cells within CD8⁺ T cells. FIG. 26D shows B-cell response evaluated in splenocytes by measuring the frequency of gE-specific IgG⁺ B cells by flow cytometry.

[0068] FIG. 27A-27C show the VZV gE-specific T cell and B cell responses induced by vaccines in splenocytes collected on Day 76 (13 days post dose 2/boost) in LAV-experienced mice immunized at Day 35 and Day 63 with a dose of SHINGRIX® (5 μg or 1 μg); VZV RNA-LNP vaccine formulated with gE_WT CO2 RNA construct (1 μg or 0.5 μg); VZV RNA-LNP vaccine formulated with ms5 CO1 RNA construct having cytoplasmic tail modifications (1 μg); VZV RNA-LNP vaccine formulated with ms6 CO2 RNA construct having TM modifications (1 μg); or lyophilized VZV RNA-LNP vaccine formulated with gE_WT CO2 (gE_WT CO2 Lyo) (1 μg). FIG. 27A shows ICS assay measured IFN-γ-expressing cells within CD4⁺ T cells expressed as percentage of IFN-γ⁺ cells within CD4⁺ T cells. FIG. 27B shows ICS assay measured IFN-γ-expressing cells within CD8⁺ T cells expressed as percentage of IFN-γ⁺ cells within CD8⁺ T cells. FIG. 27C shows B-cell response evaluated in splenocytes by measuring the frequency of gE-specific IgG⁺ B cells by flow cytometry.

### DETAILED DESCRIPTION

[0069] The present disclosure provides for an RNA molecule (e.g., RNA polynucleotide) comprising at least one open reading frame (ORF) encoding a varicella-zoster virus (VZV) antigen. In some aspects, the VZV antigen is a VZV polypeptide. In some aspects, the VZV polypeptide is a VZV gE polypeptide. In some aspects, the VZV polypeptide comprises an amino acid sequence of Table 1. In some aspects, the RNA molecules comprise an ORF transcribed from at least one DNA nucleic acid sequence of Table 2. In some aspects, the RNA molecules comprise an ORF comprising an RNA nucleic acid sequence of Table 3. In some aspects the RNA molecule comprises at least one of a 5′ cap, 5′ UTR, 3′ UTR and poly-A tail. The present disclosure provides for an RNA molecule comprising modified nucleotides (e.g., modified RNA; modRNA). The present disclosure provides for an immunogenic composition comprising any one of the RNA molecules encoding a VZV polypeptide described herein complexed with, encapsulated in, or formulated with one or more lipids, and forming lipid nanoparticles (RNA-LNPs). The present disclosure further provides for an immunogenic composition comprising any one of the RNA molecules comprising at least one RNA nucleic acid described herein complexed with, encapsulated in, or formulated with one or more lipids, and forming RNA-LNPs. The present disclosure further provides for a method of preventing, treating or ameliorating an infection, disease or condition (e.g., herpes zoster or shingles) in a subject via administering to a subject an effective amount of an RNA molecule, RNA-LNP or an immunogenic composition described herein. The present disclosure further provides for the use of the RNA molecule, RNA-LNP and/or an immunogenic compositions described herein as a vaccine.

### I. Examples of Definitions

[0070] Throughout this application, the term “about” is used according to its plain and ordinary meaning in the area of cell and molecular biology to indicate a deviation of ±10% of the value(s) to which it is attached.

[0071] Recitation of ranges of values herein is merely intended to serve as a shorthand method of referring individually to each separate value falling within the range. Unless otherwise indicated herein, each individual value is incorporated into the specification as if it was individually recited herein.

[0072] The use of the word “a” or “an” when used in conjunction with the term “comprising” may mean “one,” but it is also consistent with the meaning of “one or more,” “at least one,” and “one or more than one.”

[0073] The phrase “and/or” means “and” or “or.” To illustrate, A, B, and/or C includes: A alone, B alone, C alone, a combination of A and B, a combination of A and C, a combination of B and C, or a combination of A, B, and C. In other words, “and/or” operates as an inclusive or.

[0074] The phrase “essentially all” is defined as “at least 95%”; if essentially all members of a group have a certain property, then at least 95% of members of the group have that property. In some aspects, essentially all means equal to any one of, at least any one of, or between any two of 95, 96, 97, 98, 99, or 100% of members of the group have that property.

[0075] The compositions and methods for their use may “comprise,” “consist essentially of,” or “consist of” any of the ingredients or steps disclosed throughout the specification. Throughout this specification, unless the context requires otherwise, the words “comprising” (and any form of comprising, such as “comprise” and “comprises”), “having” (and any form of having, such as “have” and “has”), “including” (and any form of including, such as “includes” and “include”) or “containing” (and any form of containing, such as “contains” and “contain”) are inclusive or open-ended and will be understood to imply the inclusion of a stated step or element or group of steps or elements but not the exclusion of any other step or element or group of steps or elements. It is contemplated that aspects described herein in the context of the term “comprising” may also be implemented in the context of the term “consisting of” or “consisting essentially of.” Compositions and methods “consisting essentially of” any of the ingredients or steps disclosed limits the scope of the claim to the specified materials or steps which do not materially affect the basic and novel characteristic of the claimed disclosure. The words “consisting of” (and any form of consisting of, such as “consist of” and “consists of”) means including, and limited to, whatever follows the phrase “consisting of.” Thus, the phrase “consisting of” indicates that the listed elements are required or mandatory, and that no other elements may be present.

[0076] Reference throughout this specification to “one aspect,” “an aspect,” “a particular aspect,” “a related aspect,” “a certain aspect,” “an additional aspect,” or “a further aspect” or combinations thereof means that a particular feature, structure or characteristic described in connection with the aspect is included in at least one aspect of the present disclosure. Thus, the appearances of the foregoing phrases in various places throughout this specification are not necessarily all referring to the same aspect. Furthermore, the particular features, structures, or characteristics may be combined in any suitable manner in one or more aspects.

[0077] The terms “inhibiting,” “decreasing,” or “reducing” or any variation of these terms includes any measurable decrease (e.g., a 5%, 10%, 15%, 20%, 25%, 30%, 35%, 40%, 45%, 50%, 55%, 60%, 65%, 70%, 75%, 80%, 85%, 90%, 95%, or 99% decrease) or complete inhibition to achieve a desired result. The terms “improve,” “promote,” or “increase” or any variation of these terms includes any measurable increase (e.g., a 5%, 10%, 15%, 20%, 25%, 30%, 35%, 40%, 45%, 50%, 55%, 60%, 65%, 70%, 75%, 80%, 85%, 90%, 95%, or 99% increase) to achieve a desired result or production of a protein or molecule.

[0078] As used herein, the terms “reference,” “standard,” or “control” describe a value relative to which a comparison is performed. For example, an agent, subject, population, sample, or value of interest is compared with a reference, standard, or control agent, subject, population, sample, or value of interest. A reference, standard, or control may be tested and/or determined substantially simultaneously and/or with the testing or determination of interest for an agent, subject, population, sample, or value of interest and/or may be determined or characterized under comparable conditions or circumstances to the agent, subject, population, sample, or value of interest under assessment.

[0079] The term “isolated” may refer to a nucleic acid or polypeptide that is substantially free of cellular material, bacterial material, viral material, or culture medium (when produced by recombinant DNA techniques) of their source of origin, or chemical precursors or other chemicals (when chemically synthesized). Moreover, an isolated compound refers to one that may be administered to a subject as an isolated compound; in other words, the compound may not simply be considered “isolated” if it is adhered to a column or embedded in an agarose gel. Moreover, an “isolated nucleic acid fragment” or “isolated peptide” is a nucleic acid or protein fragment that is not naturally occurring as a fragment and/or is not typically in the functional state and/or that is altered or removed from the natural state through human intervention. For example, a DNA naturally present in a living animal is not “isolated,” but a synthetic DNA, or a DNA partially or completely separated from the coexisting materials of its natural state is “isolated.” An isolated nucleic acid may exist in substantially purified form, or may exist in a non-native environment such as, for example, a cell into which the nucleic acid has been delivered.

[0080] A “nucleic acid,” as used herein, is a molecule comprising nucleic acid components and refers to DNA or RNA molecules. It may be used interchangeably with the term “polynucleotide.” A nucleic acid molecule is a polymer comprising or consisting of nucleotide monomers, which are covalently linked to each other by phosphodiester-bonds of a sugar/phosphate-backbone. Nucleic acids may also encompass modified nucleic acid molecules, such as base-modified, sugar-modified or backbone-modified etc. DNA or RNA molecules. Nucleic acids may exist in a variety of forms such as: isolated segments and recombinant vectors of incorporated sequences or recombinant polynucleotides encoding polypeptides, such as antigens or one or both chains of an antibody, or a fragment, derivative, mutein, or variant thereof, polynucleotides sufficient for use as hybridization probes, PCR primers or sequencing primers for identifying, analyzing, mutating or amplifying a polynucleotide encoding a polypeptide, anti-sense nucleic acids for inhibiting expression of a polynucleotide, mRNA, saRNA, and complementary sequences of the foregoing described herein. Nucleic acids may encode an epitope to which antibodies may bind.

[0081] The term “epitope” refers to a moiety that is specifically recognized by an immunoglobulin (e.g., antibody or receptor) binding component. In some aspects, an epitope is comprised of a plurality of chemical atoms or groups on an antigen. In some aspects, such chemical atoms or groups are surface-exposed when the antigen adopts a relevant three-dimensional conformation. In some aspects, such chemical atoms or groups are physically near to each other in space when the antigen adopts such a conformation. In some aspects, at least some such chemical atoms are groups are physically separated from one another when the antigen adopts an alternative conformation (e.g., is linearized).

[0082] Nucleic acids may be single-stranded or double-stranded and may comprise RNA and/or DNA nucleotides and artificial variants thereof (e.g., peptide nucleic acids). In some cases, a nucleic acid sequence may encode a polypeptide sequence with additional heterologous coding sequences, for example to allow for purification of the polypeptide, transport, secretion, post-translational modification, or for therapeutic benefits such as targeting or efficacy. A tag or other heterologous polypeptide may be added to the modified polypeptide-encoding sequence, wherein “heterologous” refers to a polypeptide that is not the same as the modified polypeptide.

[0083] The term “polynucleotide” refers to a nucleic acid molecule that may be recombinant or has been isolated from total genomic nucleic acid. Included within the term “polynucleotide” are oligonucleotides (nucleic acids 100 residues or less in length), recombinant vectors, including, for example, plasmids, cosmids, phage, viruses, and the like. Polynucleotides include, in certain aspects, regulatory sequences, isolated substantially away from their naturally occurring genes or protein encoding sequences. Polynucleotides may be single-stranded (coding or antisense) or double-stranded, and may be RNA, DNA (genomic, cDNA, or synthetic), analogs thereof, or a combination thereof. Additional coding or non-coding sequences may, but need not, be present within a polynucleotide.

[0084] In certain aspects, there are polynucleotide variants having substantial identity to the sequences disclosed herein; those comprising equal to any one of, at least any one of, at most any one of, or between any two of 70%, 75%, 80%, 85%, 90%, 95%, 96%, 97%, 98%, or 99% or higher sequence identity, compared to a polynucleotide sequence provided herein using the methods described herein (e.g., BLAST analysis using standard parameters). In certain aspects, the isolated polynucleotide will comprise a nucleotide sequence encoding a polypeptide that has at least 90% identity to an amino acid sequence described herein, over the entire length of the sequence; or a nucleotide sequence complementary to said isolated polynucleotide. In some aspects, the isolated polynucleotide will comprise a nucleotide sequence encoding a polypeptide that has at least 95% identity to an amino acid sequence described herein, over the entire length of the sequence; or a nucleotide sequence complementary to said isolated polynucleotide.

[0085] The nucleic acid segments, regardless of the length of the coding sequence itself, may be combined with other nucleic acid sequences, such as promoters, polyadenylation signals, additional restriction enzyme sites, multiple cloning sites, other coding segments, and the like, such that their overall length may vary considerably. The nucleic acids may be any length. They may be, for example, equal to any one of, at least any one of, at most any one of, or between any two of 5, 10, 15, 20, 25, 30, 35, 40, 45, 50, 75, 100, 125, 175, 200, 250, 300, 350, 400, 450, 500, 750, 1000, 1500, 3000, 5000, 6000, 7000, 8000, 9000, 10000, 11000, 12000, 13000, 14000, 15000 or more nucleotides in length, and/or may comprise one or more additional sequences, for example, regulatory sequences, and/or be a part of a larger nucleic acid, for example, a vector. It is therefore contemplated that a nucleic acid fragment of almost any length may be employed, with the total length being limited by the ease of preparation and use in the intended recombinant nucleic acid protocol.

[0086] In this respect, the term “gene” is used to refer to a nucleic acid that encodes a protein, polypeptide, or peptide (including any sequences required for proper transcription, post-translational modification, or localization). As will be understood by those in the art, this term encompasses genomic sequences, expression cassettes, cDNA sequences, and smaller engineered nucleic acid segments that express, or may be adapted to express, proteins, polypeptides, domains, peptides, fusion proteins, and mutants. A nucleic acid encoding all or part of a polypeptide may contain a contiguous nucleic acid sequence encoding all or a portion of such a polypeptide. It also is contemplated that a particular polypeptide may be encoded by nucleic acids containing variations having slightly different nucleic acid sequences but, nonetheless, encode the same or substantially similar polypeptide.

[0087] As used herein, the term “expression” of a nucleic acid sequence refers to the generation of any gene product from the nucleic acid sequence. In some aspects, a gene product may be a transcript. In some aspects, a gene product may be a polypeptide. In some aspects, expression of a nucleic acid sequence involves one or more of the following: (1) production of an RNA template from a DNA sequence (e.g., by transcription); (2) processing of an RNA transcript (e.g., by splicing, editing, etc.); (3) translation of an RNA into a polypeptide or protein; and/or (4) post-translational modification of a polypeptide or protein.

[0088] In general, the term “engineered” refers to the aspect of having been manipulated by the hand of man. For example, a polynucleotide is considered to be “engineered” when two or more sequences that are not linked together in that order in nature are manipulated by the hand of man to be directly linked to one another in the engineered polynucleotide and/or when a particular residue in a polynucleotide is non-naturally occurring and/or is caused through action of the hand of man to be linked with an entity or moiety with which it is not linked in nature.

[0089] The term “DNA,” as used herein, means a nucleic acid molecule comprising nucleotides such as deoxy-adenosine-monophosphate, deoxy-thymidine-monophosphate, deoxy-guanosine-monophosphate and deoxy-cytidine-monophosphate monomers which are composed of a sugar moiety (deoxyribose), a base moiety and a phosphate moiety, and polymerize by a characteristic backbone structure. The backbone structure is, typically, formed by phosphodiester bonds between the sugar moiety of the nucleotide, e.g., deoxyribose, of a first and a phosphate moiety of a second, adjacent monomer. The specific order of the monomers, e.g., the order of the bases linked to the sugar/phosphate-backbone, is called the DNA sequence. DNA may be single stranded or double stranded. In the double stranded form, the nucleotides of the first strand typically hybridize with the nucleotides of the second strand, e.g. by A/T-base-pairing and G/C-base-pairing. DNA may contain all, or a majority of, deoxyribonucleotide residues. As used herein, the term “deoxyribonucleotide” means a nucleotide lacking a hydroxyl group at the 2′ position of a β-D-ribofuranosyl group. Without any limitation, DNA may encompass double stranded DNA, antisense DNA, single stranded DNA, isolated DNA, synthetic DNA, DNA that is recombinantly produced, and modified DNA.

[0090] The term “RNA,” as used herein, means a nucleic acid molecule comprising nucleotides such as adenosine-monophosphate, uridine-monophosphate, guanosine-monophosphate and cytidine-monophosphate monomers which are connected to each other along a so-called backbone. The backbone is formed by phosphodiester bonds between the sugar, e.g., ribose, of a first and a phosphate moiety of a second, adjacent monomer. RNA may be obtainable by transcription of a DNA-sequence, e.g., inside a cell. In eukaryotic cells, transcription is typically performed inside the nucleus or the mitochondria. In vivo, transcription of DNA may result in premature RNA which is processed into messenger-RNA (mRNA). Processing of the premature RNA, e.g. in eukaryotic organisms, comprises various posttranscriptional modifications such as splicing, 5′ capping, polyadenylation, export from the nucleus or the mitochondria. Mature messenger RNA is processed and provides the nucleotide sequence that may be translated into an amino acid sequence of a peptide or protein. A mature mRNA may comprise a 5′ cap, a 5′ UTR, an open reading frame, a 3′ UTR and a poly-A tail sequence. RNA may contain all, or a majority of, ribonucleotide residues. As used herein, the term “ribonucleotide” means a nucleotide with a hydroxyl group at the 2′ position of a β-D-ribofuranosyl group. In one aspect, RNA may be messenger RNA (mRNA) that relates to a RNA transcript which encodes a peptide or protein. As known to those of skill in the art, mRNA generally contains a 5′ untranslated region (5′ UTR), a polypeptide coding region, and a 3′ untranslated region (3′ UTR). Without any limitation, RNA may encompass double stranded RNA, antisense RNA, single stranded RNA, isolated RNA, synthetic RNA, RNA that is recombinantly produced, and modified RNA (modRNA).

[0091] An “isolated RNA” is defined as an RNA molecule that may be recombinant or has been isolated from total genomic nucleic acid. An isolated RNA molecule or protein may exist in substantially purified form, or may exist in a non-native environment such as, for example, a host cell.

[0092] A “modified RNA” or “modRNA” refers to an RNA molecule having at least one addition, deletion, substitution, and/or alteration of one or more nucleotides as compared to naturally occurring RNA. Such alterations may refer to the addition of non-nucleotide material to internal RNA nucleotides, or to the 5′ and/or 3′ end(s) of RNA. In one aspect, such modRNA contains at least one modified nucleotide, such as an alteration to the base of the nucleotide. For example, a modified nucleotide may replace one or more uridine and/or cytidine nucleotides. For example, these replacements may occur for every instance of uridine and/or cytidine in the RNA sequence, or may occur for only select uridine and/or cytidine nucleotides. Such alterations to the standard nucleotides in RNA may include non-standard nucleotides, such as chemically synthesized nucleotides or deoxynucleotides. For example, at least one uridine nucleotide may be replaced with N1-methylpseudouridine in an RNA sequence. Other such altered nucleotides are known to those of skill in the art. Such altered RNA molecules are considered analogs of naturally-occurring RNA. In some aspects, the RNA is produced by in vitro transcription using a DNA template, where DNA refers to a nucleic acid that contains deoxyribonucleotides. In some aspects, the RNA may be replicon RNA (replicon), in particular self-replicating RNA, or self-amplifying RNA (saRNA).

[0093] As contemplated herein, without any limitations, RNA may be used as a therapeutic modality to treat and/or prevent a number of conditions in mammals, including humans. Methods described herein comprise administration of the RNA described herein to a mammal, such as a human. For example, in one aspect such methods of use for RNA include an antigen-coding RNA vaccine to induce robust neutralizing antibodies and accompanying/concomitant T-cell response to achieve protective immunization. In some aspects, minimal vaccine doses are administered to induce robust neutralizing antibodies and accompanying/concomitant T-cell response to achieve protective immunization. In one aspect, the RNA administered is in vitro transcribed RNA. For example, such RNA may be used to encode at least one antigen intended to generate an immune response in said mammal. Pathogenic antigens are peptide or protein antigens derived from a pathogen associated with infectious disease. In specific aspects, the pathogenic are peptide or protein antigens derived from VZV. Conditions and/or diseases that may be treated with RNA disclosed herein include, but are not limited to, those caused and/or impacted by viral infection. Such viruses include, but are not limited to, VZV.

[0094] “Prevent” or “prevention,” as used herein when used in connection with the occurrence of a disease, disorder, and/or condition, refers to reducing the risk of developing the disease, disorder and/or condition and/or to delaying onset of one or more characteristics or symptoms of the disease, disorder or condition. Prevention may be considered complete when onset of a disease, disorder, or condition has been delayed for a predefined period of time.

[0095] As will be understood from context, “risk” of a disease, disorder, and/or condition refers to a likelihood that a particular individual will develop the disease, disorder, and/or condition. In some aspects, risk is expressed as a percentage. In some aspects, risk is, is at least, or is at most from 0, 1, 2, 3, 4, 5, 6, 7, 8, 9, 10, 20, 30, 40, 50, 60, 70, 80, 90 up to 100%. In some aspects risk is expressed as a risk relative to a risk associated with a reference sample or group of reference samples. In some aspects, a reference sample or group of reference samples have a known risk of a disease, disorder, condition and/or event. In some aspects a reference sample or group of reference samples are from individuals comparable to a particular individual. In some aspects, risk may reflect one or more genetic attributes, e.g., which may predispose an individual toward development (or not) of a particular disease, disorder and/or condition. In some aspects, risk may reflect one or more epigenetic events or attributes and/or one or more lifestyle or environmental events or attributes. Susceptible to: An individual who is “susceptible to” a disease, disorder, and/or condition is one who has a higher risk of developing the disease, disorder, and/or condition than does a member of the general public. In some aspects, an individual who is susceptible to a disease, disorder and/or condition may not have been diagnosed with the disease, disorder, and/or condition. In some aspects, an individual who is susceptible to a disease, disorder, and/or condition may exhibit symptoms of the disease, disorder, and/or condition. In some aspects, an individual who is susceptible to a disease, disorder, and/or condition may not exhibit symptoms of the disease, disorder, and/or condition. In some aspects, an individual who is susceptible to a disease, disorder, and/or condition will develop the disease, disorder, and/or condition. In some aspects, an individual who is susceptible to a disease, disorder, and/or condition will not develop the disease, disorder, and/or condition.

[0096] The terms “protein,” “polypeptide,” or “peptide” are used herein as synonyms and refer to a polymer of amino acid monomers, e.g., a molecule comprising at least two amino acid residues. Polypeptides may include gene products, naturally occurring polypeptides, synthetic polypeptides, homologs, orthologs, paralogs, fragments and other equivalents, variants, and analogs of the foregoing. Polypeptides may be a single molecule or may be a multi-molecular complex such as a dimer, trimer or tetramer. A protein comprises one or more peptides or polypeptides, and may be folded into a 3-dimensional form, which may be required for the protein to exert its biological function.

[0097] As used herein, the term “wild type” or “WT” or “native” refers to the endogenous version of a molecule that occurs naturally in an organism. In some aspects, wild type versions of a protein or polypeptide are employed, however, in other aspects of the disclosure, a modified protein or polypeptide is employed to generate an immune response. The terms described above may be used interchangeably.

[0098] A “modified protein” or “modified polypeptide” or a “variant” refers to a protein or polypeptide whose chemical structure, particularly its amino acid sequence, is altered with respect to the wild type protein or polypeptide. In some aspects, a modified/variant protein or polypeptide has at least one modified activity or function (recognizing that proteins or polypeptides may have multiple activities or functions). It is specifically contemplated that a modified/variant protein or polypeptide may be altered with respect to one activity or function yet retain a wild type activity or function in other respects, such as immunogenicity. Where a protein is specifically mentioned herein, it is in general a reference to a native (wild type) or recombinant (modified) protein. The protein may be isolated directly from the organism of which it is native, produced by recombinant DNA/exogenous expression methods, produced by solid-phase peptide synthesis (SPPS), or other in vitro methods. In particular aspects, there are isolated nucleic acid segments and recombinant vectors incorporating nucleic acid sequences that encode a polypeptide (e.g., an antigen or fragment thereof). The term “recombinant” may be used in conjunction with a polypeptide or the name of a specific polypeptide, and this generally refers to a polypeptide produced from a nucleic acid molecule that has been manipulated in vitro or that is a replication product of such a molecule.

[0099] The term “fragment,” with reference to an amino acid sequence (peptide or protein), relates to a part of an amino acid sequence, e.g., a sequence which represents the amino acid sequence shortened at the N-terminus and/or C-terminus. A fragment shortened at the C-terminus (N-terminal fragment) is obtainable, e.g., by translation of a truncated open reading frame that lacks the 3′-end of the open reading frame. A fragment shortened at the N-terminus (C-terminal fragment) is obtainable, e.g., by translation of a truncated open reading frame that lacks the 5′-end of the open reading frame, as long as the truncated open reading frame comprises a start codon that serves to initiate translation. A fragment of an amino acid sequence comprises, e.g., at least 50%, at least 60%, at least 70%, at least 80%, at least 90%, or at least 99% of the amino acid residues from an amino acid sequence. In the present disclosure, a fragment of a polypeptide, DNA nucleic acid or RNA nucleic acid sequence refers to a sequence having sequence identity of at least, at most, exactly, or between any two of 5%, 10%, 20%, 30%, 40%, 50%, 60%, 70%, 80%, 85%, 86%, 87%, 88%, 89%, 90%, 91%, 92%, 93%, 94%, 95%, 96%, 97%, 98%, or 99% with a polypeptide, DNA nucleic acid or RNA nucleic acid sequence, from which it is derived.

[0100] In one aspect, a fragment of a polypeptide, DNA nucleic acid or RNA nucleic acid sequence refers to a sequence having sequence identity of at least 70% with a polypeptide, DNA nucleic acid or RNA nucleic acid sequence, from which it is derived.

[0101] In one aspect, a fragment of a polypeptide, DNA nucleic acid or RNA nucleic acid sequence refers to a sequence having sequence identity of at least 80% with a polypeptide, DNA nucleic acid or RNA nucleic acid sequence, from which it is derived.

[0102] In one aspect, a fragment of a polypeptide, DNA nucleic acid or RNA nucleic acid sequence refers to a sequence having sequence identity of at least 85% with a polypeptide, DNA nucleic acid or RNA nucleic acid sequence, from which it is derived.

[0103] In one aspect, a fragment of a polypeptide, DNA nucleic acid or RNA nucleic acid sequence refers to a sequence having sequence identity of at least 90% with a polypeptide, DNA nucleic acid or RNA nucleic acid sequence, from which it is derived.

[0104] In one aspect, a fragment of a polypeptide, DNA nucleic acid or RNA nucleic acid sequence refers to a sequence having sequence identity of at least 95% with a polypeptide, DNA nucleic acid or RNA nucleic acid sequence, from which it is derived. In one aspect, a fragment of a polypeptide, DNA nucleic acid or RNA nucleic acid sequence refers to a sequence having sequence identity of at least 97% with a polypeptide, DNA nucleic acid or RNA nucleic acid sequence, from which it is derived. In one aspect, a fragment of a polypeptide, DNA nucleic acid or RNA nucleic acid sequence refers to a sequence having sequence identity of at least 99% with a polypeptide, DNA nucleic acid or RNA nucleic acid sequence, from which it is derived.

[0105] As used herein in the context of molecules, e.g., nucleic acids, proteins, or small molecules, the term “variant” refers to a molecule that shows significant structural identity with a reference molecule but differs structurally from the reference molecule, e.g., in the presence or absence or in the level of one or more chemical moieties as compared to the reference entity. In some aspects, a variant also differs functionally from its reference molecule. In general, whether a particular molecule is properly considered to be a “variant” of a reference molecule is based on its degree of structural identity with the reference molecule. As will be appreciated by those skilled in the art, any biological or chemical reference molecule has certain characteristic structural elements. A variant, by definition, is a distinct molecule that shares one or more such characteristic structural elements but differs in at least one aspect from the reference molecule. In some aspects, a variant polypeptide or nucleic acid may differ from a reference polypeptide or nucleic acid as a result of one or more differences in amino acid or nucleotide sequence and/or one or more differences in chemical moieties (e.g., carbohydrates, lipids, phosphate groups) that are covalently components of the polypeptide or nucleic acid (e.g., that are attached to the polypeptide or nucleic acid backbone). In some aspects, a variant polypeptide or nucleic acid shows an overall sequence identity with a reference polypeptide or nucleic acid that is at least, at most, exactly, or between any two of 85%, 86%, 87%, 88%, 89%, 90%, 91%, 92%, 93%, 94%, 95%, 96%, 97%, or 99%. In some aspects, a variant polypeptide or nucleic acid does not share at least one characteristic sequence element with a reference polypeptide or nucleic acid. In some aspects, a reference polypeptide or nucleic acid has one or more biological activities. In some aspects, a variant polypeptide or nucleic acid shares one or more of the biological activities of the reference polypeptide or nucleic acid. In some aspects, a variant polypeptide or nucleic acid lacks one or more of the biological activities of the reference polypeptide or nucleic acid. In some aspects, a variant polypeptide or nucleic acid shows a reduced level of one or more biological activities as compared to the reference polypeptide or nucleic acid. In some aspects, a polypeptide or nucleic acid of interest is considered to be a “variant” of a reference polypeptide or nucleic acid if it has an amino acid or nucleotide sequence that is identical to that of the reference but for a small number of sequence alterations at particular positions. Preferably, the variant polypeptide or nucleic acid sequence has at least one modification compared to the reference polypeptide or nucleic acid sequence, e.g., from 1 to about 20 modifications. In one aspect, the variant polypeptide or nucleic acid sequence has from 1 to about 10 modifications compared to the reference polypeptide or nucleic acid sequence. In one aspect, the variant polypeptide or nucleic acid sequence has from 1 to about 5 modifications compared to the reference polypeptide or nucleic acid sequence. Typically, fewer than about 20%, about 15%, about 10%, about 9%, about 8%, about 7%, about 6%, about 5%, about 4%, about 3%, or about 2% of the residues in a variant are substituted, inserted, or deleted, as compared to the reference. Often, a variant polypeptide or nucleic acid comprises a very small number (e.g., fewer than about 5, about 4, about 3, about 2, or about 1) number of substituted, inserted, or deleted, functional residues (e.g., residues that participate in a particular biological activity) relative to the reference. In some aspects, a variant polypeptide or nucleic acid comprises about 10, about 9, about 8, about 7, about 6, about 5, about 4, about 3, about 2, or about 1 substituted residues as compared to a reference. In some aspects, a variant polypeptide or nucleic acid comprises fewer than about 25, about 20, about 19, about 18, about 17, about 16, about 15, about 14, about 13, about 10, about 9, about 8, about 7, about 6, and commonly fewer than about 5, about 4, about 3, or about 2 additions or deletions as compared to the reference. In some aspects, a variant polypeptide or nucleic acid comprises not more than about 5, about 4, about 3, about 2, or about 1 addition or deletion, and, in some aspects, comprises no additions or deletions, as compared to the reference.

[0106] In some aspects, a reference polypeptide or nucleic acid is a “wild type” or “WT” or “native” sequence found in nature, including allelic variations. A wild type polypeptide or nucleic acid sequence has a sequence that has not been intentionally modified. For the purposes of the present disclosure, “variants” of an amino acid sequence (peptide, protein, or polypeptide) comprise amino acid insertion variants, amino acid addition variants, amino acid deletion variants and/or amino acid substitution variants. “Variants” of a nucleotide sequence comprise nucleotide insertion variants, nucleotide addition variants, nucleotide deletion variants and/or nucleotide substitution variants. The term “variant” includes all mutants, splice variants, post-translationally modified variants, conformations, isoforms, allelic variants, species variants, and species homologs, in particular those which are naturally occurring. The term “variant” includes, in particular, fragments of an amino acid or nucleic acid sequence.

[0107] Changes may be introduced by mutation into a nucleic acid, thereby leading to changes in the amino acid sequence of a polypeptide (e.g., an antigen or antibody or antibody derivative) that it encodes. Mutations may be introduced using any technique known in the art. In one aspect, one or more particular amino acid residues are changed using, for example, a site-directed mutagenesis protocol. In another aspect, one or more randomly selected residues are changed using, for example, a random mutagenesis protocol. In some aspects, however it is made, a mutant polypeptide may be expressed and screened for a desired property.

[0108] Mutations may be introduced into a nucleic acid without significantly altering the biological activity of a polypeptide that it encodes. For example, one may make nucleotide substitutions leading to amino acid substitutions at non-essential amino acid residues. Alternatively, one or more mutations may be introduced into a nucleic acid that selectively changes the biological activity of a polypeptide that it encodes. For example, the mutation may quantitatively or qualitatively change the biological activity. Examples of quantitative changes include increasing, reducing or eliminating the activity. Examples of qualitative changes include altering the antigen specificity of an antibody.

[0109] “Sequence similarity” indicates the percentage of amino acids that either are identical or that represent conservative amino acid substitutions. “Sequence identity” between two amino acid sequences indicates the percentage of amino acids that are identical between the sequences. “Sequence identity” between two nucleic acid sequences indicates the percentage of nucleotides that are identical between the sequences.

[0110] The terms “% identical,” “% identity,” or similar terms are intended to refer, in particular, to the percentage of nucleotides or amino acids which are identical in an optimal alignment between the sequences to be compared. Said percentage is purely statistical, and the differences between the two sequences may be but are not necessarily randomly distributed over the entire length of the sequences to be compared. Comparisons of two sequences are usually carried out by comparing the sequences, after optimal alignment, with respect to a segment or “window of comparison,” in order to identify local regions of corresponding sequences. The optimal alignment for a comparison may be carried out manually or with the aid of the local homology algorithm by Smith and Waterman, 1981, Ads App. Math. 2, 482, with the aid of the local homology algorithm by Neddleman and Wunsch, 1970, J. Mol. Biol. 48, 443, with the aid of the similarity search algorithm by Pearson and Lipman, 1988, Proc. Natl Acad. Sci. USA 88, 2444, or with the aid of computer programs using said algorithms (GAP, BESTFIT, FASTA, BLAST P, BLAST N, and TFASTA in Wisconsin Genetics Software Package, Genetics Computer Group). In some aspects, percent identity of two sequences is determined using the BLASTN or BLASTP algorithm, as available on the United States National Center for Biotechnology Information (NCBI) website.

[0111] Percentage identity is obtained by determining the number of identical positions at which the sequences to be compared correspond, dividing this number by the number of positions compared (e.g., the number of positions in the reference sequence) and multiplying this result by 100.

[0112] In some aspects, the degree of similarity or identity is given for a region that is at least, at most, exactly, or between any two of about 50%, about 60%, about 70%, about 80%, about 90%, or about 100% of the entire length of the reference sequence. For example, if the reference nucleic acid sequence consists of 200 nucleotides, the degree of identity is given for at least, at most, exactly, or between any two of about 100, about 120, about 140, about 160, about 180, or about 200 nucleotides, in some aspects, continuous nucleotides. In some aspects, the degree of similarity or identity is given for the entire length of the reference sequence.

[0113] Homologous amino acid sequences may exhibit at least, at most, exactly, or between any two of 40%, 50%, 60%, 70%, 80%, 90%, 95%, 98%, or 99% identity of the amino acid residues. In one aspect, homologous amino acid sequences exhibit at least 95% identity of the amino acid residues. In one aspect, homologous amino acid sequences exhibit at least 98% identity of the amino acid residues. In one aspect, homologous amino acid sequences exhibit at least 99% identity of the amino acid residues.

[0114] A fragment or variant of an amino acid sequence (peptide or protein) may be a “functional fragment” or “functional variant.” The term “functional fragment” or “functional variant” of an amino acid sequence relates to any fragment or variant exhibiting one or more functional properties identical or similar to those of the amino acid sequence from which it is derived, e.g., it is functionally equivalent. With respect to antigens or antigenic sequences, one particular function is one or more immunogenic activities displayed by the amino acid sequence from which the fragment or variant is derived. The term “functional fragment” or “functional variant,” as used herein, in particular refers to a variant molecule or sequence that comprises an amino acid sequence that is altered by one or more amino acids compared to the amino acid sequence of the parent molecule or sequence and that is still capable of fulfilling one or more of the functions of the parent molecule or sequence, e.g., inducing an immune response. In one aspect, the modifications in the amino acid sequence of the parent molecule or sequence do not significantly affect or alter the characteristics of the molecule or sequence.

[0115] An amino acid sequence (peptide, protein, or polypeptide) “derived from” a designated amino acid sequence (peptide, protein, or polypeptide) refers to the origin of the first amino acid sequence. Preferably, the amino acid sequence which is derived from a particular amino acid sequence has an amino acid sequence that is identical, essentially identical, or homologous to that particular sequence or a fragment thereof. Amino acid sequences derived from a particular amino acid sequence may be variants of that particular sequence or a fragment thereof. For example, it will be understood by one of ordinary skill in the art that the antigens suitable for use herein may be altered such that they vary in sequence from the naturally occurring or native sequences from which they were derived, while retaining the desirable activity of the native sequences.

[0116] In the present disclosure, a vector refers to a nucleic acid molecule, such as an artificial nucleic acid molecule. A vector may be used to incorporate a nucleic acid sequence, such as a nucleic acid sequence comprising an open reading frame. Vectors include, but are not limited to, storage vectors, expression vectors, cloning vectors, transfer vectors. A vector may be an RNA vector or a DNA vector. In some aspects the vector is a DNA molecule. In some aspects, the vector is a plasmid vector. In some aspects, the vector is a viral vector. Typically, an expression vector will contain a desired coding sequence and appropriate other sequences necessary for the expression of the operably linked coding sequence in a particular host organism (e.g., bacteria, yeast, plant, insect, or mammal) or in in vitro expression systems. Cloning vectors are generally used to engineer and amplify a certain desired fragment (typically a DNA fragment), and may lack functional sequences needed for expression of the desired fragment(s).

[0117] As used herein, the term “pharmaceutical composition” refers to an active agent, formulated together with one or more pharmaceutically acceptable carriers. Pharmaceutical compositions may be immunogenic compositions. In some aspects, active agent is present in unit dose amount appropriate for administration in a therapeutic regimen that shows a statistically significant probability of achieving a predetermined therapeutic effect when administered to a relevant population. In some aspects, pharmaceutical compositions may be specially formulated for parenteral administration, for example, by subcutaneous, intramuscular, intravenous or epidural injection as, for example, a sterile solution or suspension, or sustained-release formulation.

[0118] As used herein, the term “vaccination” refers to the administration of an immunogenic composition intended to generate an immune response, for example to a disease-associated (e.g., disease-causing) agent (e.g., a virus). In some aspects, vaccination may be administered before, during, and/or after exposure to a disease-associated agent, and in certain aspects, before, during, and/or shortly after exposure to the agent. In some aspects, vaccination includes multiple administrations, appropriately spaced in time, of a vaccine composition. In some aspects, vaccination generates an immune response to an infectious agent. In some aspects, vaccination generates an immune response to a tumor; in some such aspects, vaccination is “personalized” in that it is partly or wholly directed to epitope(s) (e.g., which may be or include one or more neoepitopes) determined to be present in a particular individual's tumors.

[0119] An immune response refers to a humoral response, a cellular response, or both a humoral and cellular response in an organism. An immune response may be measured by assays that include, but are not limited to, assays measuring the presence or amount of antibodies that specifically recognize a protein or cell surface protein, assays measuring T-cell activation or proliferation, and/or assays that measure modulation in terms of activity or expression of one or more cytokines.

[0120] As used herein, the term “combination therapy” refers to those situations in which a subject is simultaneously exposed to two or more therapeutic regimens (e.g., two or more therapeutic agents). In some aspects, the two or more regimens may be administered simultaneously; in some aspects, such regimens may be administered sequentially (e.g., all “doses” of a first regimen are administered prior to administration of any doses of a second regimen); in some aspects, such agents are administered in overlapping dosing regimens. In some aspects, “administration” of combination therapy may involve administration of one or more agent(s) or modality(ies) to a subject receiving the other agent(s) or modality(ies) in the combination. For clarity, combination therapy does not require that individual agents be administered together in a single composition (or even necessarily at the same time), although in some aspects, two or more agents, or active moieties thereof, may be administered together in a combination composition, or even in a combination compound (e.g., as part of a single chemical complex or covalent entity).

[0121] Those skilled in the art will appreciate that the term “dosing regimen” may be used to refer to a set of unit doses (typically more than one) that are administered individually to a subject, typically separated by periods of time. In some aspects, a given therapeutic agent has a recommended dosing regimen, which may involve one or more doses. In some aspects, a dosing regimen comprises a plurality of doses each of which is separated in time from other doses. In some aspects, individual doses are separated from one another by a time period of the same length; in some aspects, a dosing regimen comprises a plurality of doses and at least two different time periods separating individual doses. In some aspects, all doses within a dosing regimen are of the same unit dose amount. In some aspects, different doses within a dosing regimen are of different amounts. In some aspects, a dosing regimen comprises a first dose in a first dose amount, followed by one or more additional doses in a second dose amount different from the first dose amount. In some aspects, a dosing regimen comprises a first dose in a first dose amount, followed by one or more additional doses in a second dose amount same as the first dose amount. In some aspects, a dosing regimen is correlated with a desired or beneficial outcome when administered across a relevant population (e.g., is a therapeutic dosing regimen).

### II. Varicella Zoster Virus (VZV)

[0122] The present disclosure provides for RNA molecules (e.g., RNA polynucleotides) comprising at least one open reading frame encoding a varicella-zoster virus (VZV) polypeptide. The present disclosure further provides for an immunogenic composition comprising at least one RNA molecule encoding a VZV polypeptide complexed with, encapsulated in, or formulated with one or more lipids, and forming lipid nanoparticles (LNPs).

[0123] Varicella-zoster virus (VZV), also known as human herpesvirus 3 (HHV-3), is a human pathogen that causes varicella or chicken pox in children and re-emerges later as herpes zoster or shingles. VZV has an inner capsid that surrounds a linear double stranded DNA genome. Surrounding the capsid is a tegument layer with glycoproteins, and the outermost layer is a lipid-rich envelope with glycoproteins. Glycoproteins have a variety of functions, from DNA replication or capsid assembly to interacting with cell surface molecules and assisting with fusion into the plasma membrane. For example, glycoprotein E is an integral membrane protein thought to be important for T-cell infection and cell-to-cell spread of the virus. VZV shows tropism for neurons and T cells.

[0124] Upon primary infection with VZV (e.g., varicella or “chickenpox”), VZV establishes latency in sensory ganglia. VZV-specific T cells are needed to clear the primary infection and prevent reactivation. The mechanisms of reactivation are unknown, but VZV cell-mediated immunity is thought to play a role. Deficiencies in cell-mediate immunity (e.g., advanced age, immunocompromising conditions) are risk factors for reactivation. Reactivation allows for VZV replication and transport to the skin, possibly manifesting as herpes zoster (HZ).

[0125] Herpes zoster most commonly manifests as a unilateral vesicular rash with pain that is typically restricted to one dermatome or to several contiguous dermatomes. Within days of onset of the rash, grouped vesicles, bullae, or pustules may develop; these lesions contain VZV and are considered to be infectious. Characteristic pain of herpes zoster includes sensations of burning or numbness, pruritis, or allodynia. Many people develop prodromal pain 2-3 days before the rash appears. Among immunocompetent persons, lesions crust in 7-10 days and are no longer infectious once crusted.

[0126] The most common complication of herpes zoster is postherpetic neuralgia (PHN), and up to 15% of persons with herpes zoster develop PHN. PHN is significant pain in the area affected by herpes zoster after crusting of the rash. Older age and prodromal symptoms are considered to be risk factors for PHN. Other complications of herpes zoster include ocular complications (herpes zoster opthalmicus or keratitis, acute retinal necrosis), neurologic complications (herpes zoster oticus, meningitis, encephalitis, myelitis, peripheral motor neuropathy, Guillan-Barré syndrome, and stroke), and secondary bacterial skin and soft tissue infections.

[0127] The VZV genome encodes at least 71 unique proteins (ORF0-ORF68) with three more opening reading frames (ORF69-ORF71) that duplicate earlier open reading frames (ORF64-62, respectively). Encoded proteins form the structure of the virus particle, including nine glycoproteins: ORF5 (gK), ORF9A (gN), ORF14 (gC), ORF31 (gB), ORF37 (gH), ORF50 (gM), ORF60 (gL), ORF67 (gI), and ORF68 (gE). The encoded glycoproteins gE, gI, gB, gH, gK, gL, gC, gN, and gM function in different steps of the viral replication cycle. The most abundant glycoprotein found in infected cells, as well as in the mature virion, is glycoprotein E (gE, ORF 68), which is a major component of the virion envelope and is essential for viral replication. Glycoprotein I (gI, ORG 67) forms a complex with gE in infected cells, which facilitates the endocytosis of both glycoproteins and directs them to the trans-Golgi network (TGN) where the final viral envelope is acquired. VZV gE is a 623-amino-acid type I membrane protein encoded by open reading frame 68 (ORF68) and is the most abundant viral glycoprotein expressed on the surface of VZV-infected cells. Glycoprotein I (gI) is required within the TGN for VZV envelopment and for efficient membrane fusion during VZV replication. VZV gE and gI are found complexed together on the infected host cell surface. Glycoprotein B (ORF 31), which is the second most prevalent glycoprotein and thought to play a role in virus entry, binds to neutralizing antibodies. Glycoprotein H is thought to have a fusion function facilitating cell to cell spread of the virus. Antibodies to gE, gB, and gH are prevalent after natural infection and following vaccination and have been shown to neutralize viral activity in vitro. As used herein, the term “varicella-zoster virus” or “VZV” is not limited to any particular strain or variant.

[0128] In some aspects, the RNA molecule comprises an open reading frame encoding a VZV antigen. In some aspects, the VZV antigen is a VZV polypeptide. In some aspects, the VZV polypeptide is a VZV glycoprotein (e.g. gK, gN, gC, gB, gH, gM, gL gI and gE) or a fragment or a variant thereof. In some aspects, the RNA molecule encodes a VZV gK polypeptide, the RNA molecule encodes a VZV gN polypeptide, the RNA molecule encodes a VZV gC polypeptide, the RNA molecule encodes a VZV gB polypeptide, the RNA molecule encodes a VZV gH polypeptide, the RNA molecule encodes a VZV gM polypeptide, the RNA molecule encodes a VZV gL polypeptide, the RNA molecule encodes a VZV gI polypeptide, and/or the RNA molecule encodes a VZV gE polypeptide. In a one aspect, the RNA molecule encodes a VZV gE polypeptide. In some aspects, the VZV polypeptide comprises two or more (e.g., 2, 3, 4, 5, 6, 7, 8, 9, or more) VZV polypeptides.

[0129] In some aspects, the VZV polypeptide is a full-length VZV polypeptide. In some aspects, the VZV polypeptide is a truncated VZV polypeptide. In some aspects, the VZV polypeptide is a variant of a VZV polypeptide. In some aspects, the VZV polypeptide is a fragment of a VZV polypeptide.

[0130] In some aspects, the VZV polypeptide is a full-length gK polypeptide. In some aspects, the VZV polypeptide is a truncated VZV gK polypeptide. In some aspects, the VZV polypeptide is a variant of a VZV gK polypeptide. In some aspects, the VZV polypeptide is a fragment of a VZV gK polypeptide.

[0131] In some aspects, the VZV polypeptide is a full-length gN polypeptide. In some aspects, the VZV polypeptide is a truncated VZV gN polypeptide. In some aspects, the VZV polypeptide is a variant of a VZV gN polypeptide. In some aspects, the VZV polypeptide is a fragment of a VZV gN polypeptide.

[0132] In some aspects, the VZV polypeptide is a full-length gC polypeptide. In some aspects, the VZV polypeptide is a truncated VZV gC polypeptide. In some aspects, the VZV polypeptide is a variant of a VZV gC polypeptide. In some aspects, the VZV polypeptide is a fragment of a VZV gC polypeptide.

[0133] In some aspects, the VZV polypeptide is a full-length gB polypeptide. In some aspects, the VZV polypeptide is a truncated VZV gB polypeptide. In some aspects, the VZV polypeptide is a variant of a VZV gB polypeptide. In some aspects, the VZV polypeptide is a fragment of a VZV gB polypeptide.

[0134] In some aspects, the VZV polypeptide is a full-length gH polypeptide. In some aspects, the VZV polypeptide is a truncated VZV gH polypeptide. In some aspects, the VZV polypeptide is a variant of a VZV gH polypeptide. In some aspects, the VZV polypeptide is a fragment of a VZV gH polypeptide.

[0135] In some aspects, the VZV polypeptide is a full-length gM polypeptide. In some aspects, the VZV polypeptide is a truncated VZV gM polypeptide. In some aspects, the VZV polypeptide is a variant of a VZV gM polypeptide. In some aspects, the VZV polypeptide is a fragment of a VZV gM polypeptide.

[0136] In some aspects, the VZV polypeptide is a full-length gL polypeptide. In some aspects, the VZV polypeptide is a truncated VZV gL polypeptide. In some aspects, the VZV polypeptide is a variant of a VZV gL polypeptide. In some aspects, the VZV polypeptide is a fragment of a VZV gL polypeptide.

[0137] In some aspects, the VZV polypeptide is a full-length gI polypeptide. In some aspects, the VZV polypeptide is a truncated VZV gI polypeptide. In some aspects, the VZV polypeptide is a variant of a VZV gI polypeptide. In some aspects, the VZV polypeptide is a fragment of a VZV gI polypeptide.

[0138] In some aspects, the VZV polypeptide is a full-length gE polypeptide. In some aspects, the VZV polypeptide is a truncated VZV gE polypeptide. In some aspects, the VZV polypeptide is a variant of a VZV gE polypeptide. In some aspects, the VZV polypeptide is a fragment of a VZV gE polypeptide.

[0139] In some aspects, the VZV polypeptide comprises at least one mutation. In some aspects, the VZV polypeptide is a VZV gK polypeptide comprising at least one mutation. In some aspects, the VZV polypeptide is a VZV gN polypeptide comprising at least one mutation. In some aspects, the VZV polypeptide is a VZV gC polypeptide comprising at least one mutation. In some aspects, the VZV polypeptide is a VZV gB polypeptide comprising at least one mutation. In some aspects, the VZV polypeptide is a VZV gH polypeptide comprising at least one mutation. In some aspects, the VZV polypeptide is a VZV gM polypeptide comprising at least one mutation. In some aspects, the VZV polypeptide is a VZV gL polypeptide comprising at least one mutation. In some aspects, the VZV polypeptide is a VZV gI polypeptide comprising at least one mutation. In some aspects, the VZV polypeptide is a VZV gE polypeptide comprising at least one mutation.

[0140] In some aspects, the RNA molecule encodes a VZV gE polypeptide comprising the amino acid sequence according to any one of GENBANK® Accession No.: AAG32558.1, ABE03086.1, AAK01047.1, Q9J3M8.1, AEW88548.1, AGY33616.1, AEW89124.1. AIT53150.1, CAA25033.1, NP_040190.1, AKG56356.1, AEW89412.1, ABF21714.1, ABF21714.1, AAT07749.1, AEW88764.1, AAG48520.1, and/or AEW88980.1, or fragment or variant thereof, the respective sequences of which are herein incorporated by reference. In some aspects, the RNA molecule encodes a VZV gE polypeptide comprising the amino acid sequence according to GENBANK® Accession No. AH009994.2 (ORF68), or fragment or variant thereof, the sequence of which is herein incorporated by reference.

[0141] In some aspects, the RNA molecule encodes a VZV polypeptide of Table 1 (see Example 7). In some aspects, the RNA molecule encodes a VZV gE polypeptide comprising an amino acid sequence of any of SEQ ID NO: 1 to 11, or fragment or variant thereof. In some aspects, VZV gE polypeptide may have at least, at most, exactly, or between any two of 70%, 71%, 72%, 73%, 74%, 75%, 76%, 77%, 78%, 79%, 80%, 81%, 82%, 83%, 84%, 85%, 86%, 87%, 88%, 89%, 90%, 91%, 92%, 93%, 94%, 95%, 96%, 97%, 98%, or 99% identity to any of the amino acid sequences of Table 1, for example, any of SEQ ID NO: 1 to 11. In some aspects, VZV gE polypeptide consists of any of the amino acid sequences of Table 1, for example, any of SEQ ID NO: 1 to 11.

[0142] In some aspects, the RNA molecule sequence is transcribed from a DNA nucleic acid sequence (DNA polynucleotide) of Table 2 (see Example 7). In some aspects, the RNA molecule comprises an ORF transcribed from a nucleic acid sequence of any of SEQ ID NO: 12 to 145, or fragment or variant thereof. In some aspects, the RNA molecule comprises an ORF transcribed from a nucleic acid sequence that may have at least, at most, exactly, or between any two of 70%, 71%, 72%, 73%, 74%, 75%, 76%, 77%, 78%, 79%, 80%, 81%, 82%, 83%, 84%, 85%, 86%, 87%, 88%, 89%, 90%, 91%, 92%, 93%, 94%, 95%, 96%, 97%, 98%, or 99% identity to any of the nucleic sequences of Table 2, for example, any of SEQ ID NO: 12 to 145. In some aspects, the RNA molecule comprises an ORF transcribed from a nucleic acid sequence that consists of any of the nucleic sequences of Table 2, for example, any of SEQ ID NO: 12 to 145.

[0143] In some aspects, the RNA molecule comprises an ORF comprising an RNA nucleic acid sequence (RNA polynucleotide) of Table 3 (see Example 7). In some aspects, the RNA molecule comprises an ORF comprising a nucleic acid sequence of any of SEQ ID NO: 146 to 279, or fragment or variant thereof. In some aspects, the RNA molecule comprises an ORF comprising a nucleic acid sequence that may have at least, at most, exactly, or between any two of 70%, 71%, 72%, 73%, 74%, 75%, 76%, 77%, 78%, 79%, 80%, 81%, 82%, 83%, 84%, 85%, 86%, 87%, 88%, 89%, 90%, 91%, 92%, 93%, 94%, 95%, 96%, 97%, 98%, or 99% identity to any of the RNA nucleic acid sequences of Table 3, for example, any of SEQ ID NO: 146 to 279. In some aspects, the RNA molecule comprises an ORF comprising a nucleic acid sequence that consists of any of the RNA nucleic acid sequences of Table 3, for example, any of SEQ ID NO: 146 to 279.

[0144] In some aspects, the RNA molecule comprises stabilized RNA. In some aspects, the RNA molecule comprises a nucleic acid sequence having at least one uridine replaced by N1-methylpseudouridine. In some aspects, the RNA molecule comprises a sequence having all uridines replaced by N1-methylpseudouridine (designated as “ψ”). In some aspects, the RNA molecule comprises an ORF comprising a nucleic acid sequence of any of SEQ ID NO: 146 to 279, wherein all uridines have been replaced by N1-methylpseudouridine (designated as “ψ”).

[0145] In some aspects, the RNA molecule comprises an open reading frame encoding a VZV polypeptide amino acid sequence that may be at least, at most, exactly, or between any two of 70%, 80%, 85%, 86%, 87%, 88%, 89%, 90%, 91%, 92%, 93%, 94%, 95%, 96%, 97%, 98%, or 99% identical to any of the VZV polypeptide sequences of SEQ ID NO: 1 to 11 (Table 1) or other VZV polypeptide described herein. In some aspects, the RNA molecule comprises an open reading frame encoding a VZV polypeptide amino acid sequence that consists of any of the VZV polypeptide sequences of SEQ ID NO: 1 to 11 (Table 1) or other VZV polypeptide described herein.

[0146] In some aspects, the RNA molecule comprises an open reading frame transcribed from a DNA nucleic acid sequence that may be at least, at most, exactly, or between any two of 70%, 80%, 85%, 86%, 87%, 88%, 89%, 90%, 91%, 92%, 93%, 94%, 95%, 96%, 97%, 98%, or 99% identical to any of the nucleic acid sequences of SEQ ID NO: 12 to 145 (Table 2) or other nucleic acid described herein. In some aspects, the RNA molecule comprises an open reading frame transcribed from a DNA nucleic acid sequence that consists of any of the nucleic acid sequences of SEQ ID NO: 12 to 145 (Table 2) or other nucleic acid described herein.

[0147] In some aspects, the RNA molecule comprises an open reading frame comprising an RNA nucleic acid sequence that may be at least, at most, exactly, or between any two of 70%, 80%, 85%, 86%, 87%, 88%, 89%, 90%, 91%, 92%, 93%, 94%, 95%, 96%, 97%, 98%, or 99% identical to any of the nucleic acid sequences of SEQ ID NO: 146 to 279 (Table 3) or other nucleic acid described herein. In some aspects, the RNA molecule comprises an open reading frame comprising an RNA nucleic acid sequence that consists of any of the nucleic acid sequences of SEQ ID NO: 146 to 279 (Table 3) or other nucleic acid described herein. In some aspects, the RNA molecule comprises an ORF comprising a nucleic acid sequence of any of SEQ ID NO: 146 to 279 (Table 3), wherein all uridines have been replaced by N1-methylpseudouridine (designated as “ψ”).

### III. RNA Molecule

[0148] In some aspects, the RNA molecule described herein is a coding RNA molecule. Coding RNA includes a functional RNA molecule that may be translated into a peptide or polypeptide. In some aspects, the coding RNA molecule includes at least one open reading frame (ORF) coding for at least one peptide or polypeptide. An open reading frame comprises a sequence of codons that is translatable into a peptide or protein. The coding RNA molecule may include one (monocistronic), two (bicistronic) or more (multicistronic) OFRs, which may be a sequence of codons that is translatable into a polypeptide or protein of interest.

[0149] The coding RNA molecule may be a messenger RNA (mRNA) molecule, viral RNA molecule, or self-amplifying RNA molecule (saRNA, also referred to as a replicon). In some aspects, the RNA molecule is an mRNA. Preferably, the RNA molecule of the present disclosure is an mRNA. In some aspects, the RNA molecule is a saRNA. In some aspects, the saRNA molecule may be a coding RNA molecule.

[0150] The RNA molecule may encode one polypeptide of interest or more, such as an antigen or more than one antigen, e.g., two, three, four, five, six, seven, eight, nine, ten or more polypeptides. Alternatively, or in addition, one RNA molecule may also encode more than one polypeptide of interest, such as an antigen, e.g., a bicistronic, or tricistronic RNA molecule that encodes different or identical antigens.

[0151] The sequence of the RNA molecule may be codon optimized or deoptimized for expression in a desired host, such as a human cell. In some aspects, a gene of interest (e.g., an antigen) described herein is encoded by a coding sequence which is codon-optimized and/or the guanosine/cytidine (G/C) content of which is increased compared to wild type coding sequence. In some aspects, one or more sequence regions of the coding sequence are codon-optimized and/or increased in the G/C content compared to the corresponding sequence regions of the wild type coding sequence. In some aspects, codon-optimization and/or increasing the G/C content does not change the sequence of the encoded amino acid sequence.

[0152] The term “codon-optimized” is understood by those in the art to refer to alteration of codons in the coding region of a nucleic acid molecule to reflect the typical codon usage of a host organism without altering the amino acid sequence encoded by the nucleic acid molecule. Within the context of the present disclosure, in some aspects, coding regions are codon-optimized for optimal expression in a subject to be treated using an RNA polynucleotide described herein. Codon-optimization is based on the finding that the translation efficiency is also determined by a different frequency in the occurrence of tRNA molecules in cells. Thus, the sequence of RNA may be modified such that codons for which frequently occurring tRNA molecules are available are inserted in place of “rare codons.”

[0153] In some aspects, G/C content of a coding region (e.g., of a gene of interest sequence; open reading frame (ORF)) of an RNA is increased compared to the G/C content of the corresponding coding sequence of a wild type RNA encoding the gene of interest, wherein in some aspects, the amino acid sequence encoded by the RNA is not modified compared to the amino acid sequence encoded by the wild type RNA. This modification of the RNA sequence is based on the fact that the sequence of any RNA region to be translated is important for efficient translation of that mRNA. Sequences having an increased G (guanosine)/C (cytidine) content are more stable than sequences having an increased A (adenosine)/U (uridine) content. In respect to the fact that several codons code for one and the same amino acid (so-called degeneration of the genetic code), the most favorable codons for the stability may be determined (so-called alternative codon usage). Depending on the amino acid to be encoded by the RNA, there are various possibilities for modification of the RNA sequence, compared to its wild type sequence. In particular, codons which contain A and/or U nucleosides may be modified by substituting these codons by other codons, which code for the same amino acids but contain no A and/or U or contain a lower content of A and/or U nucleosides. Thus, in some aspects, G/C content of a coding region of an RNA described herein is increased by at least, at most, exactly, or between any two of 10%, 20%, 30%, 40%, 50%, 55%, or even more compared to the G/C content of a coding region of a wild type RNA. In some aspects, the coding region of the VZV RNA described herein comprises a G/C content of at least 50%, at least 55%, at least 60%, at least 65%, at least 70%, at least 75%, or about 80%. In some aspects, the coding region of the VZV RNA described herein comprises a G/C content of about 50% to 75%, about 55% to 70%, about 50% to 60%, about 60% to 70%, about 70% to 80%, about 50% to 55%, about 55% to 60%, about 60% to 65%, about 65% to 70%, about 70% to 75%, or about 75% to 80%. In some aspects, the coding region of the VZV RNA described herein comprises a G/C content of about 50%, about 51%, about 52%, about 53%, about 54%, about 55%, about 56%, about 57%, about 58%, about 59%, about 60%, about 61%, about 62%, about 63%, about 64%, about 65%, about 66%, about 67%, about 68%, about 69%, about 70%, about 71%, about 72%, about 73%, about 74%, or about 75%. In some aspects, the coding region of the VZV RNA described herein comprises a G/C content of about 58%, about 66% or about 62%.

[0154] In some aspects, the RNA molecule includes from about 20 to about 100,000 nucleotides (e.g., from 30 to 50, from 30 to 100, from 30 to 250, from 30 to 500, from to 1,000, from 30 to 1,500, from 30 to 3,000, from 30 to 5,000, from 30 to 7,000, from 30 to 10,000, from 30 to 25,000, from 30 to 50,000, from 30 to 70,000, from 100 to 250, from 100 to 500, from 100 to 1,000, from 100 to 1,500, from 100 to 3,000, from 100 to 5,000, from 100 to 7,000, from 100 to 10,000, from 100 to 25,000, from 100 to 50,000, from 100 to 70,000, from 100 to 100,000, from 500 to 1,000, from 500 to 1,500, from 500 to 2,000, from 500 to 3,000, from 500 to 5,000, from 500 to 7,000, from 500 to 10,000, from 500 to 25,000, from 500 to 50,000, from 500 to 70,000, from 500 to 100,000, from 1,000 to 1,500, from 1,000 to 2,000, from 1,000 to 3,000, from 1,000 to 5,000, from 1,000 to 7,000, from 1,000 to 10,000, from 1,000 to 25,000, from 1,000 to 50,000, from 1,000 to 70,000, from 1,000 to 100,000, from 1,500 to 3,000, from 1,500 to 5,000, from 1,500 to 7,000, from 1,500 to 10,000, from 1,500 to 25,000, from 1,500 to 50,000, from 1,500 to 70,000, from 1,500 to 100,000, from 2,000 to 3,000, from 2,000 to 5,000, from 2,000 to 7,000, from 2,000 to 10,000, from 2,000 to 25,000, from 2,000 to 50,000, from 2,000 to 70,000, and from 2,000 to 100,000 nucleotides).

[0155] In some aspects, the RNA molecule has at least, at most, exactly, or between any two of about 20, 40, 60, 80, 100, 120, 140, 160, 180, 200, 220, 240, 260, 280, 300, 320, 340, 360, 380, 400, 420, 440, 460, 480, 500, 520, 540, 560, 580, 600, 620, 640, 660, 680, 700, 720, 740, 760, 780, 800, 820, 840, 860, 880, 900, 920, 940, 960, 980, 1000, 1000, 1200, 1400, 1600, 1800, 2000, 2200, 2400, 2600, 2800, 3000, 3200, 3400, 3600, 3800, 4000, 4200, 4400, 4600, 4800, 5000, 5200, 5400, 5600, 5800, 6000, 6200, 6400, 6600, 6800, 7000, 7200, 7400, 7600, 7800, 8000, 8200, 8400, 8600, 8800, 9000, 9200, 9400, 9600, 9800, 10000, 10000, 12000, 14000, 16000, 18000, 20000, 22000, 24000, 26000, 28000, 30000, 32000, 34000, 36000, 38000, 40000, 42000, 44000, 46000, 48000, 50000, 52000, 54000, 56000, 58000, 60000, 62000, 64000, 66000, 68000, 70000, 72000, 74000, 76000, 78000, 80000, 82000, 84000, 86000, 88000, 90000, 92000, 94000, 96000, 98000, or 100000 nucleotides.

[0156] In some aspects, the RNA molecule includes at least 100 nucleotides. For example, in some aspects, the RNA has a length between 100 and 15,000 nucleotides; between 7,000 and 16,000 nucleotides; between 8,000 and 15,000 nucleotides; between 9,000 and 12,500 nucleotides; between 11,000 and 15,000 nucleotides; between 13,000 and 16,000 nucleotides; between 7,000 and 25,000 nucleotides. In some aspects, the RNA molecule has at least, at most, exactly, or between any two of about 100, 150, 200, 250, 300, 350, 400, 450, 500, 550, 600, 650, 700, 750, 800, 850, 900, 950, 1000, 1050, 1100, 1150, 1200, 1250, 1300, 1350, 1400, 1450, 1500, 1550, 1600, 1650, 1700, 1750, 1800, 1850, 1900, 1950, 2000, 2050, 2100, 2150, 2200, 2250, 2300, 2350, 2400, 2450, 2500, 2550, 2600, 2650, 2700, 2750, 2800, 2850, 2900, 2950, 3000, 3050, 3100, 3150, 3200, 3250, 3300, 3350, 3400, 3450, 3500, 3550, 3600, 3650, 3700, 3750, 3800, 3850, 3900, 3950, 4000, 4050, 4100, 4150, 4200, 4250, 4300, 4350, 4400, 4450, 4500, 4550, 4600, 4650, 4700, 4750, 4800, 4850, 4900, 4950, 5000, 5050, 5100, 5150, 5200, 5250, 5300, 5350, 5400, 5450, 5500, 5550, 5600, 5650, 5700, 5750, 5800, 5850, 5900, 5950, 6000, 6050, 6100, 6150, 6200, 6250, 6300, 6350, 6400, 6450, 6500, 6550, 6600, 6650, 6700, 6750, 6800, 6850, 6900, 6950, 7000, 7050, 7100, 7150, 7200, 7250, 7300, 7350, 7400, 7450, 7500, 7550, 7600, 7650, 7700, 7750, 7800, 7850, 7900, 7950, 8000, 8050, 8100, 8150, 8200, 8250, 8300, 8350, 8400, 8450, 8500, 8550, 8600, 8650, 8700, 8750, 8800, 8850, 8900, 8950, 9000, 9050, 9100, 9150, 9200, 9250, 9300, 9350, 9400, 9450, 9500, 9550, 9600, 9650, 9700, 9750, 9800, 9850, 9900, 9950, 10000, 10050, 10100, 10150, 10200, 10250, 10300, 10350, 10400, 10450, 10500, 10550, 10600, 10650, 10700, 10750, 10800, 10850, 10900, 10950, 11000, 11050, 11100, 11150, 11200, 11250, 11300, 11350, 11400, 11450, 11500, 11550, 11600, 11650, 11700, 11750, 11800, 11850, 11900, 11950, 12000, 12050, 12100, 12150, 12200, 12250, 12300, 12350, 12400, 12450, 12500, 12550, 12600, 12650, 12700, 12750, 12800, 12850, 12900, 12950, 13000, 13050, 13100, 13150, 13200, 13250, 13300, 13350, 13400, 13450, 13500, 13550, 13600, 13650, 13700, 13750, 13800, 13850, 13900, 13950, 14000, 14050, 14100, 14150, 14200, 14250, 14300, 14350, 14400, 14450, 14500, 14550, 14600, 14650, 14700, 14750, 14800, 14850, 14900, 14950, or 15000 nucleotides.

[0157] In some aspects of the present disclosure, an RNA is or comprises messenger RNA (mRNA) that relates to an RNA transcript which encodes a polypeptide. In some aspects, an RNA disclosed herein comprises: a 5′ cap comprising a 5′ cap disclosed herein; a 5′ untranslated region comprising a cap proximal sequence (5′ UTR), a sequence encoding a protein (e.g., a polypeptide); a 3′ untranslated region (3′ UTR); and/or a polyadenylate (Poly A) sequence.

[0158] In some aspects, an RNA disclosed herein comprises the following components in 5′ to 3′ orientation: a 5′ cap comprising a 5′ cap disclosed herein; a 5′ untranslated region comprising a cap proximal sequence (5′ UTR), a sequence encoding a protein (e.g., a polypeptide); a 3′ untranslated region (3′ UTR); and a Poly-A sequence.

[0159] A. Modified Nucleobases

[0160] In the present disclosure the RNA molecules may comprise modified nucleobases which may be incorporated into modified nucleosides and nucleotides. In some aspects, the RNA molecule may include one or more modified nucleotides. Naturally occurring nucleotide modifications are known in the art.

[0161] In some aspects, the RNA molecule may include a modified nucleotide. Non-limiting examples of modified nucleotides that may be included in the RNA molecule include pseudouridine, N1-methylpseudouridine, 5-methyluridine, 3-methyl-uridine, 5-methoxy-uridine, 5-aza-uridine, 6-aza-uridine, 2-thio-5-aza-uridine, 2-thio-uridine, 4-thio-uridine, 4-thio-pseudouridine, 2-thio-pseudouridine, 5-hydroxy-uridine, 5-aminoallyl-uridine, 5-halo-uridine (e.g., 5-iodo-uridine or 5-bromo-uridine), uridine 5-oxyacetic acid, uridine 5-oxyacetic acid methyl ester, 5-carboxymethyl-uridine, 1-carboxymethyl-pseudouridine, 5-carboxy hydroxymethyl-uridine, 5-carboxy hydroxy methyl-uridine methyl ester, 5-methoxycarbonylmethyl-uridine, 5-methoxycarbonylmethyl-2-thio-uridine, 5-aminomethyl-2-thio-uridine, 5-methylaminomethyl-uridine, 1-ethyl-pseudouridine, 5-methylaminomethyl-2-thio-uridine, 5-methylaminomethyl-2-seleno-uridine, 5-carbamoylmethyl-uridine, 5-carboxymethylaminomethyl-uridine, 5-carboxymethylaminomethyl-2-thio-uridine, 5-propynyl-uridine, 1-propynyl-pseudouridine, 5-taurinomethyl-uridine, 1-taurinomethyl-pseudouridine, 5-taurinomethyl-2-thio-uridine, 1-taurinomethyl-4-thio-pseudouridine, 5-methyl-2-thio-uridine, 1-methyl-4-thio-pseudouridine, 4-thio-1-methyl-pseudouridine, 3-methyl-1-pseudouridine, 2-thio-1-methyl-pseudouridine, 1-methyl-1-deaza-pseudouridine, 2-thio-1-methyl-1-deaza-pseudouridine, dihydrouridine, dihydropseudouridine, 5,6-dihydrouridine, 5-methyl-dihydrouridine, 2-thio-dihydrouridine, 2-thio-dihydropseudouridine, 2-methoxy-uridine, 2-methoxy-4-thio-uridine, 4-methoxy-pseudouridine, 4-methoxy-2-thio-pseudouridine, N1-methyl-pseudouridine, 3-(3-amino-3-carboxypropyl)uridine, 1-methyl-3-(3-amino-3-carboxypropyl)pseudouridine, 5-(isopentenylaminomethyl)uridine, 5-(isopentenylaminomethyl)-2-thio-uridine, a-thio-uridine, 2′-O-methyl-uridine, 5,2′-O-dimethyl-uridine, 2′-O-methyl-pseudouridine, 2-thio-2′-O-methyl-uridine, 5-methoxycarbonylmethyl-2′-O-methyl-uridine, 5-carbamoylmethyl-2′-O-methyl-uridine, 5-carboxymethylaminomethyl-2′-O-methyl-uridine, 3,2′-O-dimethyl-uridine, 5-(isopentenylaminomethyl)-2′-O-methyl-uridine, 1-thio-uridine, deoxythymidine, 2′-F-ara-uridine, 2′-F-uridine, 2′-OH-ara-uridine, 5-(2-carbomethoxyvinyl) uridine, 5-[3-(1-E-propenylamino)uridine, any other modified uridine known in the art, or combinations thereof.

[0162] In some aspects of the present disclosure, modified nucleotides include any one of N1-methylpseudouridine or pseudouridine.

[0163] In some aspects, the RNA molecule comprises nucleotides that are N1-methylpseudouridine modified. In some aspects, the RNA molecule comprises nucleotides that are a pseudouridine modified.

[0164] In some aspects, an RNA comprises a modified nucleoside in place of at least one uridine. In some aspects, an RNA comprises a modified nucleoside in place of each uridine. In some aspects, the RNA molecule comprises a sequence having at least one uridine replaced by N1-methylpseudouridine. In some aspects, the RNA molecule comprises a sequence having all uridines replaced by N1-methylpseudouridine. N1-methylpseudouridine is designated in sequences as “ψ”. The term “uracil,” as used herein, describes one of the nucleobases that may occur in the nucleic acid of RNA. The term “uridine,” as used herein, describes one of the nucleosides that may occur in RNA. “Pseudouridine” is one example of a modified nucleoside that is an isomer of uridine, where the uracil is attached to the pentose ring via a carbon-carbon bond instead of a nitrogen-carbon glycosidic bond.

[0165] In some aspects, the RNA molecule comprises a nucleic acid sequence having at least one uridine replaced by N1-methylpseudouridine or pseudouridine. In some aspects, the RNA molecule comprises a nucleic acid sequence having at least, at most, exactly, or between any two of 1%, 2%, 3%, 4%, 5%, 6%, 7%, 8%, 9%, 10%, 11%, 12%, 13%, 14%, 15%, 16%, 17%, 18%, 19%, 20%, 21%, 22%, 23%, 24%, 25%, 26%, 27%, 28%, 29%, 30%, 31%, 32%, 33%, 34%, 35%, 36%, 37%, 38%, 39%, 40%, 41%, 42%, 43%, 44%, 45%, 46%, 47%, 48%, 49%, 50%, 51%, 52%, 53%, 54%, 55%, 56%, 57%, 58%, 59%, 60%, 61%, 62%, 63%, 64%, 65%, 66%, 67%, 68%, 69%, 70%, 71%, 72%, 73%, 74%, 75%, 76%, 77%, 78%, 79%, 80%, 81%, 82%, 83%, 84%, 85%, 86%, 87%, 88%, 89%, 90%, 91%, 92%, 93%, 94%, 95%, 96%, 97%, 98%, or 99% of uridines replaced by N1-methylpseudouridine or pseudouridine. In some aspects, the RNA molecule comprises a nucleic acid sequence having all uridines replaced by N1-methylpseudouridine or pseudouridine.

[0166] Modifications that may be present in the RNA molecules further include, for example, m5C (5-methylcytidine), m5U (5-methyluridine), m6A (N6-methyladenosine), s2U (2-thiouridine), Um (2′-O-methyluridine), m1A (1-methyladenosine); m2A (2-methyladenosine); Am (2-1-O-methyladenosine); ms2m6A (2-methylthio-N6-methyladenosine); i6A (N6-isopentenyladenosine); ms2i6A (2-methylthio-N6isopentenyladenosine); io6A (N6-(cis-hydroxyisopentenyl)adenosine); ms2io6A (2-methylthio-N6-(cis-hydroxyisopentenyl) adenosine); g6A (N6-glycinylcarbamoyladenosine); t6A (N6-threonyl carbamoyladenosine); ms2t6A (2-methylthio-N6-threonyl carbamoyladenosine); m6t6A (N6-methyl-N6-threonylcarbamoyladenosine); hn6A(N6-hydroxynorvalylcarbamoyl adenosine); ms2hn6A (2-methylthio-N6-hydroxynorvalyl carbamoyladenosine); Ar(p) (2′-O-ribosyladenosine (phosphate)); I (inosine); mil (1-methylinosine); m′Im (1,2′-O-dimethylinosine); m3C (3-methylcytidine); Cm (2T-O-methylcytidine); s2C (2-thiocytidine); ac4C (N4-acetylcytidine); f5C (5-formylcytosine); m5Cm (5,2-O-dimethylcytidine); ac4Cm (N4acetyl2TOmethylcytidine); k2C (lysidine); m1G (1-methylguanosine); m2G (N2-methylguanosine); m7G (7-methylguanosine); Gm (2′-O-methylguanosine); m22G (N2,N2-dimethylguanosine); m2Gm (N2,2′-O-dimethylguanosine); m22Gm (N2,N2,2′-O-trimethylguanosine); Gr(p) (2′-O-ribosylguanosine (phosphate)); yW (wybutosine); o2yW (peroxywybutosine); OHyW (hydroxywybutosine); OHyW* (undermodified hydroxywybutosine); imG (wyosine); mimG (methylguanosine); Q (queuosine); oQ (epoxyqueuosine); galQ (galtactosyl-queuosine); manQ (mannosyl-queuosine); preQo (7-cyano-7-deazaguanosine); preQi (7-aminomethyl-7-deazaguanosine); G* (archaeosine); D (dihydrouridine); m5Um (5,2′-O-dimethyluridine); s4U (4-thiouridine); m5s2U (5-methyl-2-thiouridine); s2Um (2-thio-2′-O-methyluridine); acp3U (3-(3-amino-3-carboxypropyl)uridine); ho5U (5-hydroxyuridine); mo5U (5-methoxyuridine); cmo5U (uridine 5-oxyacetic acid); mcmo5U (uridine 5-oxyacetic acid methyl ester); chm5U (5-(carboxyhydroxymethyl)uridine)); mchm5U (5-(carboxyhydroxymethyl)uridine methyl ester); mcm5U (5-methoxycarbonyl methyluridine); mcm5Um (S-methoxycarbonylmethyl-2-O-methyluridine); mcm5s2U (5-methoxycarbonylmethyl-2-thiouridine); nm5s2U (5-aminomethyl-2-thiouridine); mnm5U (5-methylaminomethyluridine); mnm5s2U (5-methylaminomethyl-2-thiouridine); mnm5se2U (5-methylaminomethyl-2-selenouridine); ncm5U (5-carbamoylmethyl uridine); ncm5Um (5-carbamoylmethyl-2′-O-methyluridine); cmnm5U (5-carboxymethylaminomethyluridine); cnmm5Um (5-carboxymethy 1 aminomethyl-2-L-Omethyluridine); cmnm5s2U (5-carboxymethylaminomethyl-2-thiouridine); m62A (N6,N6-dimethyladenosine); Tm (2′-O-methylinosine); m4C (N4-methylcytidine); m4Cm (N4,2-O-dimethylcytidine); hm5C (5-hydroxymethylcytidine); m3U (3-methyluridine); cm5U (5-carboxymethyluridine); m6Am (N6,T-O-dimethyladenosine); rn62Am (N6,N6,O-2-trimethyladenosine); m2′7G (N2,7-dimethylguanosine); m2′2′7G (N2,N2,7-trimethylguanosine); m3Um (3,2T-O-dimethyluridine); m5D (5-methyldihydrouridine); f5Cm (5-formyl-2′-O-methylcytidine); m1Gm (1,2′-O-dimethylguanosine); m′Am (1,2-O-dimethyl adenosine) irinomethyluridine); tm5s2U (S-taurinomethyl-2-thiouridine)); imG-14 (4-demethyl guanosine); imG2 (isoguanosine); ac6A (N6-acetyladenosine), hypoxanthine, inosine, 8-oxo-adenine, 7-substituted derivatives thereof, dihydrouracil, pseudouracil, 2-thiouracil, 4-thiouracil, 5-aminouracil, 5-(C1-C6)-alkyluracil, 5-methyluracil, 5-(C2-Ce)-alkenyluracil, 5-(C2-Ce)-alkynyluracil, 5-(hydroxymethyl)uracil, 5-chlorouracil, 5-fluorouracil, 5-bromouracil, 5-hydroxycytosine, 5-(C1-C6)-alkylcytosine, 5-methylcytosine, 5-(C2-C6)-alkenylcytosine, 5-(C2-C6)-alkynylcytosine, 5-chlorocytosine, 5-fluorocytosine, 5-bromocytosine, N2-dimethylguanine, 7-deazaguanine, 8-azaguanine, 7-deaza-7-substituted guanine, 7-deaza-7-(C2-C6)alkynylguanine, 7-deaza-8-substituted guanine, 8-hydroxyguanine, 6-thioguanine, 8-oxoguanine, 2-aminopurine, 2-amino-6-chloropurine, 2,4-diaminopurine, 2,6-diaminopurine, 8-azapurine, substituted 7-deazapurine, 7-deaza-7-substituted purine, 7-deaza-8-substituted purine, hydrogen (abasic residue), m5C, m5U, m6A, s2U, W, or 2′-O-methyl-U.

[0167] In some aspects, the RNA molecule may include phosphoramidate, phosphorothioate, and/or methylphosphonate linkages.

[0168] The sequence of the RNA molecule may be modified if desired, for example to increase the efficacy of expression or replication of the RNA, or to provide additional stability or resistance to degradation. For example, the RNA sequence may be modified with respect to its codon usage, for example, to increase translation efficacy and half-life of the RNA.

[0169] In some aspects, the RNA molecule of the present disclosure comprises an open reading frame having at least one codon modified sequence. A codon modified sequence relates to coding sequences that differ in at least one codon (triplets of nucleotides coding for one amino acid) compared to the corresponding wild type coding sequence. A codon modified sequence may show improved resistance to degradation, improved stability, and/or improved translatability.

[0170] The sequence of the RNA molecule may be codon optimized or deoptimized for expression in a desired host, such as a human cell.

[0171] In some aspects, the RNA molecules may include one or more structural and/or chemical modifications or alterations which impart useful properties to the polynucleotide including, in some aspects, the lack of a substantial induction of the innate immune response of a cell into which the polynucleotide is introduced. As used herein, a “structural” feature or modification is one in which two or more linked nucleotides are inserted, deleted, duplicated, inverted or randomized in an RNA molecule without significant chemical modification to the nucleotides themselves. Because chemical bonds will necessarily be broken and reformed to affect a structural modification, structural modifications are of a chemical nature and hence are chemical modifications. However, structural modifications will result in a different sequence of nucleotides. For example, the polynucleotide “ATCG” may be chemically modified to “AT-5meC-G”. The same polynucleotide may be structurally modified from “ATCG” to “ATCCCG”. Here, the dinucleotide “CC” has been inserted, resulting in a structural modification to the polynucleotide.

[0172] In some aspects, the RNA molecule may include one or more modified nucleotides in addition to any 5′ cap structure. Naturally occurring nucleotide modifications are known in the art.

[0173] In some aspects, the RNA molecule does not include modified nucleotides, e.g., does not include modified nucleobases, and all of the nucleotides in the RNA molecule are conventional standard ribonucleotides A, U, G and C, with the exception of an optional 5′ cap that may include, for example, 7-methylguanosine, which is further described below. In some aspects, the RNA may include a 5′ cap comprising a 7′-methylguanosine, and the first 1, 2 or 3 5′ ribonucleotides may be methylated at the 2′ position of the ribose.

[0174] In some aspects, the RNA molecule described herein is a non-coding RNA molecule. A non-coding RNA (ncRNA) molecule includes a functional RNA molecule that is not translated into a peptide or polypeptide. Non-coding RNA molecules may include highly abundant and functionally important RNA molecules. In some aspects, the non-coding RNA is a functional mRNA molecule that is not translated into a peptide or polypeptide. The non-coding RNA may include modified nucleotides as described herein. Preferably, the RNA molecule is an mRNA

[0175] The RNA molecules of the present disclosure may be prepared by any method know in the art, including chemical synthesis and in vitro methods, such as RNA in vitro transcription. In some of the aspects, the RNA of the present disclosure is prepared using in vitro transcription.

[0176] In some aspects, the RNA molecule of the present disclosure is purified, e.g., such as by filtration that may occur via, e.g., ultrafiltration, diafiltration, or, e.g., tangential flow ultrafiltration/diafiltration.

[0177] In some aspects, the RNA molecule of the present disclosure is lyophilized to be temperature stable.

[0178] B. 5′ CAP

[0179] In some aspects, the RNA molecule described herein includes a 5′ cap which generally “caps” the 5′ end of the RNA and stabilizes the RNA molecule.

[0180] In some aspects, the 5′ cap moiety is a natural 5′ cap. A “natural 5′ cap” is defined as a cap that includes 7-methylguanosine connected to the 5′ end of an mRNA molecule through a 5′ to 5′ triphosphate linkage. In some aspects, a guanosine nucleoside included in a 5′ cap may be modified, for example, by methylation at one or more positions (e.g., at the 7-position) on a base (guanine), and/or by methylation at one or more positions of a ribose. In some aspects, a guanosine nucleoside included in a 5′ cap comprises a 3′O methylation at a ribose (3′OMeG). In some aspects, a guanosine nucleoside included in a 5′ cap comprises methylation at the 7-position of guanine (m7G). In some aspects, a guanosine nucleoside included in a 5′ cap comprises methylation at the 7-position of guanine and a 3′O methylation at a ribose (m7(3′OMeG)). The 5′ cap may be incorporated during RNA synthesis (e.g., co-transcriptional capping) or may be enzymatically engineered after RNA transcription (e.g., post-transcriptional capping). In some aspects, co-transcriptional capping with a cap disclosed herein improves the capping efficiency of an RNA compared to co-transcriptional capping with an appropriate reference comparator. In some aspects, improving capping efficiency may increase a translation efficiency and/or translation rate of an RNA, and/or increase expression of an encoded polypeptide. In some aspects, capping is performed after purification, e.g., tangential flow filtration, of the RNA molecule.

[0181] In some aspects, an RNA described herein comprises a 5′ cap or a 5′ cap analog, e.g., a Cap 0, a Cap 1 or a Cap 2. In some aspects, a provided RNA does not have uncapped 5′-triphosphates. In some aspects, the 5′ end of the RNA is capped with a modified ribonucleotide. In some aspects, the 5′ cap moiety is a 5′ cap analog. In some aspects, an RNA may be capped with a 5′ cap analog. Cap structures include, but are not limited to, 7mG(5′)ppp(5′)N,pN2p (Cap 0) and 7mG(5′)ppp(5′)N1mpNp (Cap 1). In some aspects, an RNA described herein comprises a Cap 0. Cap 0 is a N7-methyl guanosine connected to the 5′ nucleotide through a 5′ to 5′ triphosphate linkage, typically referred to as m7G cap or m7Gppp. In the cell, the Cap 0 structure is essential for efficient translation of the mRNA that carries the cap. An additional methylation on the 2′O position of the initiating nucleotide generates Cap 1, or referred to as m7GpppNm, wherein Nm denotes any nucleotide with a 2′O methylation. In some aspects, an RNA described herein comprises a Cap 1, e.g., as described herein. In some aspects, an RNA described herein comprises a Cap 2.

[0182] In some aspects, a Cap 0 structure comprises a guanosine nucleoside methylated at the 7-position of guanine (m7G). In some aspects, a Cap 0 structure is connected to an RNA via a 5′ to 5′-triphosphate linkage and is also referred to herein as m7Gppp or m7G(5′)ppp(5′). A 5′ cap may be methylated with the structure m7G (5′) ppp (5′) N (cap-0 structure) or a derivative thereof, wherein N is the terminal 5′ nucleotide of the nucleic acid carrying the 5′ cap, typically the 5′-end of an mRNA. An exemplary enzymatic reaction for capping may include use of Vaccinia Virus Capping Enzyme (VCE) that includes mRNA triphosphatase, guanylyl-transferase and guanine-7-methytransferase, which catalyzes the construction of N7-monomethylated Cap 0 structures. Cap 0 structure plays an important role in maintaining the stability and translational efficacy of the RNA molecule.

[0183] The 5′ cap of the RNA molecule may be further modified by a 2′-O-Methyltransferase which results in the generation of a Cap 1 structure (m7Gppp [m2′-O] N), which may further increase translation efficacy. In some aspects, a Cap 1 structure comprises a guanosine nucleoside methylated at the 7-position of guanine (m7G) and a 2′O methylated first nucleotide in an RNA (2′OmeN₁). In some aspects, a Cap 1 structure is connected to an RNA via a 5′- to 5′-triphosphate linkage and is also referred to herein as m7Gppp(2′OMeN₁) or m7G(5′)ppp(5′)(2′OMeN₁). In some aspects, N₁ is chosen from A, C, G, or U. In some aspects, N₁ is A. In some aspects, N₁ is C. In some aspects, N₁ is G. In some aspects, N₁ is U. In some aspects, a m7G(5′)ppp(5′)(2′OmeN₁) Cap 1 structure comprises a second nucleotide, N₂, which is a cap proximal nucleotide at position 2 and is chosen from A, G, C, or U (m7G(5′)ppp(5′)(2′OmeN₁)N₂). In some aspects, N₂ is A. In some aspects, N₂ is C. In some aspects, N₂ is G. In some aspects, N₂ is U.

[0184] In some aspects, a Cap 1 structure comprises a guanosine nucleoside methylated at the 7-position of guanine (m7G) and one or more additional modifications, e.g., methylation on a ribose, and a 2′O methylated first nucleotide in an RNA. In some aspects, a Cap 1 structure comprises a guanosine nucleoside methylated at the 7-position of guanine, a 3′O methylation at a ribose (m7(3′OMeG)), and a 2′O methylated first nucleotide in an RNA (2′OMeN₁). In some aspects, a Cap 1 structure is connected to an RNA via a 5′- to 5′-triphosphate linkage and is also referred to herein as m7(3′OMeG)ppp(2′OMeN₁) or m7(3′OMeG)(5′)ppp(5′)(2′OMeN₁). In some aspects, N₁ is chosen from A, C, G, or U. In some aspects, N₁ is A. In some aspects, N₁ is C. In some aspects, N₁ is G. In some aspects, N₁ is U. In some aspects, a m7(3′OMeG)(5′)ppp(5′)(2′OMeN₁) Cap 1 structure comprises a second nucleotide, N₂, which is a cap proximal nucleotide at position 2 and is chosen from A, G, C, or U (m7(3′OMeG)(5′)ppp(5′)(2′OmeN₁)N₂). In some aspects, N₂ is A. In some aspects, N₂ is C. In some aspects, N₂ is G. In some aspects, N₂ is U.

[0185] In some aspects, a second nucleotide in a Cap 1 structure may comprise one or more modifications, e.g., methylation. In some aspects, a Cap 1 structure comprising a second nucleotide comprising a 2′O methylation is a Cap 2 structure.

[0186] In some aspects, the RNA molecule may be enzymatically capped at the 5′ end using Vaccinia guanylyltransferase, guanosine triphosphate, and S-adenosyl-L-methionine to yield Cap 0 structure. An inverted 7-methylguanosine cap is added via a 5′ to 5′ triphosphate bridge. Alternatively, use of a 2′O-methyltransferase with Vaccinia guanylyltransferase yields the Cap 1 structure where in addition to the Cap 0 structure, the 2′OH group is methylated on the penultimate nucleotide. S-adenosyl-L-methionine (SAM) is a cofactor utilized as a methyl transfer reagent. Non-limiting examples of 5′ cap structures are those which, among other things, have enhanced binding of cap binding polypeptides, increased half-life, reduced susceptibility to 5′ endonucleases and/or reduced 5′ decapping, as compared to synthetic 5′ cap structures known in the art (or to a wild type, natural or physiological 5′ cap structure).

[0187] For example, recombinant Vaccinia Virus Capping Enzyme and recombinant 2′ O-methyltransferase enzyme may create a canonical 5′-5′-triphosphate linkage between the 5′-terminal nucleotide of an mRNA and a guanine cap nucleotide wherein the cap guanine includes an N7 methylation and the 5′-terminal nucleotide of the mRNA includes a 2′-O-methyl. Such a structure is termed the Cap 1 structure. This cap results in a higher translational-competency and cellular stability and a reduced activation of cellular pro-inflammatory cytokines, as compared, e.g., to other 5′ cap analog structures known in the art.

[0188] In some aspects, the 5′ terminal cap includes a cap analog, for example, a 5′ terminal cap may include a guanine analog. Exemplary guanine analogs include, but are not limited to, inosine, N1-methyl-guanosine, 2′-fluoro-guanosine, 7-deaza-guanosine, 8-oxo-guanosine, 2-amino-guanosine, LNA-guanosine, and 2-azido-guanosine.

[0189] In some aspects, the capping region may include a single cap or a series of nucleotides forming the cap. In this aspect the capping region may be from 1 to 10, e.g. 2-9, 3-8, 4-7, 1-5, 5-10, or at least 2, or 10 or fewer nucleotides in length. In this aspect the capping region is at least, at most, exactly, or between any two of 1, 2, 3, 4, 5, 6, 7, 8, 9, or 10 nucleotides in length. In some aspects, the cap is absent. In some aspects, the first and second operational regions may range from 3 to 40, e.g., 5-30, 10-20, 15, or at least 4, or 30 or fewer nucleotides in length and may comprise, in addition to a Start and/or Stop codon, one or more signal and/or restriction sequences. In some aspects, the first and second operational regions are at least, at most, exactly, or between any two of 3, 4, 5, 6, 7, 8, 9, 10, 11, 12, 13, 14, 15, 16, 17, 18, 19, 20, 21, 22, 23, 24, 25, 26, 27, 28, 29, 30, 31, 32, 33, 34, 35, 36, 37, 38, 39, or 40 nucleotides in length and may comprise, in addition to a Start and/or Stop codon, one or more signal and/or restriction sequences.

[0190] Further examples of 5′ cap structures include, but are not limited to, glyceryl, inverted deoxy abasic residue (moiety), 4′, 5′ methylene nucleotide, 1-(beta-D-erythrofuranosyl) nucleotide, 4′-thio nucleotide, carbocyclic nucleotide, 1,5-anhydrohexitol nucleotide, L-nucleotides, alpha-nucleotide, modified base nucleotide, threo-pentofuranosyl nucleotide, acyclic 3′,4′-seco nucleotide, acyclic 3,4-dihydroxybutyl nucleotide, acyclic 3,5 dihydroxypentyl nucleotide, 3′-3′-inverted nucleotide moiety, 3′-3′-inverted abasic moiety, 3′-2′-inverted nucleotide moiety, 3′-2′-inverted abasic moiety, 1,4-butanediol phosphate, 3′-phosphoramidate, hexylphosphate, aminohexyl phosphate, 3′-phosphate, 3′phosphorothioate, phosphorodithioate, or bridging or non-bridging methylphosphonate moiety.

[0191] In some aspects, the RNA molecule of the present disclosure comprises at least one 5′ cap structure. In some aspects, the RNA molecule of the present disclosure does not comprise a 5′ cap structure.

[0192] In one aspect, the 5′ capping structure comprises a modified 5′ Cap 1 structure (m⁷G⁺m^{3′}-5′-ppp-5′-Am). In one aspect, the 5′ capping structure comprises is (3′OMe)-m₂^{7,3-O}Gppp (m₁^{2′-O})ApG (TriLink BioTechnologies). This molecule is identical to the natural RNA cap structure in that it starts with a guanosine methylated at N7, and is linked by a 5′ to 5′ triphosphate linkage to the first coded nucleotide of the transcribed RNA (in this case, an adenosine). This guanosine is also methylated at the 3′ hydroxyl of the ribose to mitigate possible reverse incorporation of the cap molecule. The 2′ hydroxyl of the ribose on the adenosine is methylated, conferring a Cap1 structure.

[0193] C. Untranslated Regions (UTRS)

[0194] The 5′ UTR is a regulatory region situated at the 5′end of a protein open reading frame that is transcribed into mRNA but not translated into an amino acid sequence or to the corresponding region in an RNA polynucleotide, such as an mRNA molecule. An untranslated region (UTR) may be present 5′ (upstream) of an open reading frame (5′ UTR) and/or 3′ (downstream) of an open reading frame (3′ UTR).

[0195] In some aspects, the UTR is derived from an mRNA that is naturally abundant in a specific tissue (e.g., lymphoid tissue), to which the mRNA expression is targeted. In some aspects, the UTR increases protein synthesis. Without being bound by mechanism or theory, the UTR may increase protein synthesis by increasing the time that the mRNA remains in translating polysomes (message stability) and/or the rate at which ribosomes initiate translation on the message (message translation efficiency). Accordingly, the UTR sequence may prolong protein synthesis in a tissue-specific manner.

[0196] In some aspects, the 5′ UTR and the 3′ UTR sequences are computationally derived. In some aspects, the 5′ UTR and the 3′ UTRs are derived from a naturally abundant mRNA in a tissue. The tissue may be, for example, liver, a stem cell or lymphoid tissue. The lymphoid tissue may include, for example, any one of a lymphocyte (e.g., a B-lymphocyte, a helper T-lymphocyte, a cytotoxic T-lymphocyte, a regulatory T-lymphocyte, or a natural killer cell), a macrophage, a monocyte, a dendritic cell, a neutrophil, an eosinophil and a reticulocyte. In some aspects, the 5′ UTR and the 3′ UTR are derived from an alphavirus. In some aspects, the 5′ UTR and the 3′ UTR are from a wild type alphavirus.

[0197] i. 5′ UTRS

[0198] In some aspects, an RNA disclosed herein comprises a 5′ UTR. A 5′ UTR, if present, is located at the 5′ end and starts with the transcriptional start site upstream of the start codon of a protein encoding region. A 5′ UTR is downstream of the 5′ cap (if present), e.g. directly adjacent to the 5′ cap. The 5′ UTR may contain various regulatory elements, e.g., 5′ cap structure, stem-loop structure, and an internal ribosome entry site (IRES), which may play a role in the control of translation initiation.

[0199] In some aspects, a 5′ UTR disclosed herein comprises a cap proximal sequence, e.g., as disclosed herein. In some aspects, a cap proximal sequence comprises a sequence adjacent to a 5′ cap. In some aspects, a cap proximal sequence comprises nucleotides in positions +1, +2, +3, +4, and/or +5 of an RNA polynucleotide.

[0200] In some aspects, a Cap structure comprises one or more polynucleotides of a cap proximal sequence. In some aspects, a Cap structure comprises an m7 Guanosine cap and nucleotide +1 (N₁) of an RNA polynucleotide. In some aspects, a Cap structure comprises an m7 Guanosine cap and nucleotide +2 (N₂) of an RNA polynucleotide. In some aspects, a Cap structure comprises an m7 Guanosine cap and nucleotides +1 and +2 (N₁ and N₂) of an RNA polynucleotide.

[0201] Those skilled in the art, reading the present disclosure, will appreciate that, in some aspects, one or more residues of a cap proximal sequence (e.g., one or more of residues +1, +2, +3, +4, and/or +5) may be included in an RNA by virtue of having been included in a cap entity that (e.g., a Cap 1 structure, etc); alternatively, in some aspects, at least some of the residues in a cap proximal sequence may be enzymatically added (e.g., by a polymerase such as a T7 polymerase). For example, in certain exemplified aspects where a (m₂^{7,3′-O})Gppp(m^{2′-O})ApG cap is utilized, +1 and +2 residues are the (m₂^{7,3′-O}) A and G residues of the cap, and +3, +4, and +5 residues are added by polymerase (e.g., T7 polymerase).

[0202] In some aspects, a cap proximal sequence comprises N₁ and/or N₂ of a Cap structure, wherein N₁ and N₂ are any nucleotide, e.g., A, C, G or U. In some aspects, N₁ is A. In some aspects, N₁ is C. In some aspects, N₁ is G. In some aspects, N₁ is U. In some aspects, N₂ is A. In some aspects, N₂ is C. In some aspects, N₂ is G. In some aspects, N₂ is U. In some aspects, a cap proximal sequence comprises N₁ and N₂ of a Cap structure and N₃, N₄ and N₅, wherein N₁ to N₅ correspond to positions +1, +2, +3, +4, and/or +5 of an RNA polynucleotide. In some aspects, N₁, N₂, N₃, N₄, or N₅ are any nucleotide, e.g., A, C, G or U. In some aspects, N₁N₂ comprises any one of the following: AA, AC, AG, AU, CA, CC, CG, CU, GA, GC, GG, GU, UA, UC, UG, or UU. In some aspects, N₁N₂ comprises AG and N₃N₄N₅ comprises any one of the following: AAA, ACA, AGA, AUA, AAG, AGG, ACG, AUG, AAC, ACC, AGC, AUC, AAU, ACU, AGU, AUU, CAA, CCA, CGA, CUA, CAG, CGG, CCG, CUG, CAC, CCC, CGC, CUC, CAU, CCU, CGU, CUU, GAA, GCA, GGA, GUA, GAG, GGG, GCG, GUG, GAC, GCC, GGC, GUC, GAU, GCU, GGU, GUU, UAA, UCA, UGA, UUA, UAG, UGG, UCG, UUG, UAC, UCC, UGC, UUC, UAU, UCU, UGU, or UUU.

[0203] In some aspects, a cap proximal sequence comprises N₁ and N₂ of a Cap structure, and a sequence comprising: A₃A₄X₅ (SEQ ID NO: 307; wherein X₅ is A, G, C, or U), where N₁ and N₂ are each independently chosen from: A, C, G, or U. In some aspects, N₁ is A and N₂ is G. In some aspects, X₅ is chosen from A, C, G or U. In some aspects, X₅ is A. In some aspects, X₅ is C. In some aspects, X₅ is G. In some aspects, X₅ is U.

[0204] In some aspects, a cap proximal sequence comprises N₁ and N₂ of a Cap structure, and a sequence comprising: C₃A₄X₅ (SEQ ID NO: 308; wherein X₅ is A, G, C, or U), where N₁ and N₂ are each independently chosen from: A, C, G, or U. In some aspects, N₁ is A and N₂ is G. In some aspects, X₅ is chosen from A, C, G or U. In some aspects, X₅ is A. In some aspects, X₅ is C. In some aspects, X₅ is G. In some aspects, X₅ is U.

[0205] In some aspects, a cap proximal sequence comprises N₁ and N₂ of a Cap structure, and a sequence comprising X₃Y₄X₅ (SEQ ID NO: 309; wherein X₃ or X₅ are each independently chosen from A, G, C, or U; and Y₄ is not C). In some aspects, N₁ and N₂ are each independently chosen from: A, C, G, or U. In some aspects, N₁ is A and N₂ is G. In some aspects, X₃ and X₅ is each independently chosen from A, C, G or U. In some aspects, X₃ and/or X₅ is A. In some aspects, X₃ and/or X₅ is C. In some aspects, X₃ and/or X₅ is G. In some aspects, X₃ and/or X₅ is U. In some aspects, Y₄ is C. In other aspects, Y₄ is not C. In some aspects, Y₄ is A. In some aspects, Y₄ is G. In other aspects, Y₄ is not G. In some aspects, Y4 is U.

[0206] In some aspects, a cap proximal sequence comprises N₁ and N₂ of a Cap structure, and a sequence comprising A₃C₄A₅ (SEQ ID NO: 310). In some aspects, N₁ and N₂ are each independently chosen from: A, C, G, or U. In some aspects, N₁ is A and N₂ is G.

[0207] In some aspects, a cap proximal sequence comprises N₁ and N₂ of a Cap structure, and a sequence comprising A₃U₄G₅ (SEQ ID NO: 311). In some aspects, N₁ and N₂ are each independently chosen from: A, C, G, or U. In some aspects, N₁ is A and N₂ is G.

[0208] Exemplary 5′ UTRs include a human alpha globin (hAg) 5′UTR or a fragment thereof, a TEV 5′ UTR or a fragment thereof, a HSP705′ UTR or a fragment thereof, or a c-Jun 5′ UTR or a fragment thereof.

[0209] In some aspects, an RNA disclosed herein comprises a hAg 5′ UTR or a fragment thereof. In some aspects, an RNA disclosed herein comprises a hAg 5′ UTR having 99%, 98%, 97%, 96%, 95%, 90%, 85%, or 80% identity to a human alpha globin 5′ UTR provided in SEQ ID NO: 312. In some aspects, an RNA disclosed herein comprises a hAg 5′ UTR provided in SEQ ID NO: 312.

SEQ ID NO: 312
AGAAUAAACUAGUAUUCUUCUGGUCCCCACAGACUCAGAGAGAACCC

[0210] In some aspects, an RNA disclosed herein comprises a hAg 5′ UTR having 99%, 98%, 97%, 96%, 95%, 90%, 85%, or 80% identity to a human alpha globin 5′ UTR provided in SEQ ID NO: 313. In some aspects, an RNA disclosed herein comprises a hAg 5′ UTR provided in SEQ ID NO: 313.

SEQ ID NO: 313
AAACUAGUAUUCUUCUGGUCCCCACAGACUCAGAGAGAACCC

[0211] In one aspect, a DNA encoding a 5′ UTR disclosed herein comprises a sequence having at least, at most, exactly, or between any two of 99%, 98%, 97%, 96%, 95%, 90%, 85%, or 80% identity to SEQ ID NO: 280. In one aspect, the DNA encoding the 5′ UTR comprises a sequence of SEQ ID NO: 280. In one aspect, an RNA disclosed herein comprises a 5′ UTR comprising a sequence having at least, at most, exactly, or between any two of 99%, 98%, 97%, 96%, 95%, 90%, 85%, or 80% identity to a 5′ UTR provided in any of SEQ ID NO: 281 to 282 in which the transcribed 5′ cap structure is underlined. In one aspect, the 5′ UTR comprises a sequence of any of SEQ ID NO: 281 to 282, in which the transcribed 5′ cap structure is underlined.

(DNA)
SEQ ID NO: 280
AGAATAAACTAGTATTCTTCTGGTCCCCACAGACTCAGAGAGAACCCGC
CACC
(RNA)
SEQ ID NO: 281
AGAAUAAACUAGUAUUCUUCUGGUCCCCACAGACUCAGAGAGAACCCGC
CACC
(RNA)
SEQ ID NO: 282
AGAAΨAAACΨAGΨAΨΨCΨΨCΨGGΨCCCCACAGACΨCAGAGAGAACCCGC
CACC

[0212] ii. 3′ UTRS

[0213] In some aspects, an RNA disclosed herein comprises a 3′ UTR. A 3′ UTR, if present, is situated downstream of a protein coding sequence open reading frame, e.g., downstream of the termination codon of a protein-encoding region. A 3′ UTR is typically the part of an mRNA which is located between the protein coding sequence and the poly-A tail of the mRNA. Thus, in some aspects, the 3′ UTR is upstream of the poly-A sequence (if present), e.g. directly adjacent to the poly-A sequence. The 3′ UTR may be involved in regulatory processes including transcript cleavage, stability and polyadenylation, translation, and mRNA localization.

[0214] A 3′ UTR may also comprise elements, which are not encoded in the template, from which an RNA is transcribed, but which are added after transcription during maturation, e.g. a poly-A tail. A 3′ UTR of the mRNA is not translated into an amino acid sequence. In some aspects, an RNA disclosed herein comprises a 3′ UTR comprising an F element and/or an I element. In some aspects, a 3′ UTR or a proximal sequence thereto comprises a restriction site. In some aspects, a restriction site is a BamHI site. In some aspects, a restriction site is a XhoI site.

[0215] In some aspects, an RNA disclosed herein comprises a 3′ UTR having at least, at most, exactly, or between any two of 99%, 98%, 97%, 96%, 95%, 90%, 85%, or 80% identity to a 3′ UTR provided in SEQ ID NO: 314. In some aspects, an RNA disclosed herein comprises a 3′ UTR provided in SEQ ID NO: 314.

SEQ ID NO: 314
CUGGUACUGCAUGCACGCAAUGCUAGCUGCCCCUUUCCCGUCCUGGGUAC
CCCGAGUCUCCCCCGACCUCGGGUCCCAGGUAUGCUCCCACCUCCACCUG
CCCCACUCACCACCUCUGCUAGUUCCAGACACCUCCCAAGCACGCAGCAA
UGCAGCUCAAAACGCUUAGCCUAGCCACACCCCCACGGGAAACAGCAGUG
AUUAACCUUUAGCAAUAAACGAAAGUUUAACUAAGCUAUACUAACCCCAG
GGUUGGUCAAUUUCGUGCCAGCCACACC

[0216] In one aspect, a DNA encoding a 3′ UTR disclosed herein comprises a sequence having at least, at most, exactly, or between any two of 99%, 98%, 97%, 96%, 95%, 90%, 85%, or 80% identity to SEQ ID NO: 283. In one aspect, the DNA encoding the 5′ UTR comprises a sequence of SEQ ID NO: 283. In one aspect, an RNA disclosed herein comprises a 3′ UTR comprising a sequence having at least, at most, exactly, or between any two of 99%, 98%, 97%, 96%, 95%, 90%, 85%, or 80% identity to a 3′ UTR provided in any of SEQ ID NO: 284 to 285 and 317 to 318. In one aspect, the 3′ UTR comprises a sequence of any of SEQ ID NO: 284 to 285 and 317 to 318.

(DNA)
SEQ ID NO: 283
CTCGAGCTGGTACTGCATGCACGCAATGCTAGCTGCCCCTTTCCCGTCCT
GGGTACCCCGAGTCTCCCCCGACCTCGGGTCCCAGGTATGCTCCCACCTC
CACCTGCCCCACTCACCACCTCTGCTAGTTCCAGACACCTCCCAAGCACG
CAGCAATGCAGCTCAAAACGCTTAGCCTAGCCACACCCCCACGGGAAACA
GCAGTGATTAACCTTTAGCAATAAACGAAAGTTTAACTAAGCTATACTAA
CCCCAGGGTTGGTCAATTTCGTGCCAGCCACACCCTGGAGCTAGC
(RNA)
SEQ ID NO: 284
CUCGAGCUGGUACUGCAUGCACGCAAUGCUAGCUGCCCCUUUCCCGUCCU
GGGUACCCCGAGUCUCCCCCGACCUCGGGUCCCAGGUAUGCUCCCACCUC
CACCUGCCCCACUCACCACCUCUGCUAGUUCCAGACACCUCCCAAGCACG
CAGCAAUGCAGCUCAAAACGCUUAGCCUAGCCACACCCCCACGGGAAACA
GCAGUGAUUAACCUUUAGCAAUAAACGAAAGUUUAACUAAGCUAUACUAA
CCCCAGGGUUGGUCAAUUUCGUGCCAGCCACACCCUGGAGCUAGC
(RNA)
SEQ ID NO: 285
CΨCGAGCΨGGΨACΨGCAΨGCACGCAAΨGCΨAGCΨGCCCCΨΨΨCCCGΨCCΨ
GGGΨACCCCGAGΨCΨCCCCCGACCΨCGGGΨCCCAGGΨAΨGCΨCCCACCΨC
CACCΨGCCCCACΨCACCACCΨCΨGCΨAGΨΨCCAGACCΨCCCAAGCACGCA
GCAAΨGCAGCΨCAAAACGCΨΨAGCCΨAGCCACACCCCCACGGGAAACAGC
AGΨGAΨΨAACCΨΨΨAGCAAΨAAACGAAAGΨΨΨAACΨAAGCΨAΨACΨAACC
CCAGGGΨΨGGΨCAAΨΨΨCGΨGCCAGCCACACCCΨGGAGCΨAGC
(RNA)
SEQ ID NO: 317
CUCGAGCUGGUACUGCAUGCACGCAAUGCUAGCUGCCCCUUUCCCGUCCU
GGGUACCCCGAGUCUCCCCCGACCUCGGGUCCCAGGUAUGCUCCCACCUC
CACCUGCCCCACUCACCACCUCUGCUAGUUCCAGACACCUCCCAAGCACG
CAGCAAUGCAGCUCAAAACGCUUAGCCUAGCCACACCCCCACGGGAAACA
GCAGUGAUUAACCUUUAGCAAUAAACGAAAGUUUAACUAAGCUAUACUAA
CCCCAGGGUUGGUCAAUUUCGUGCCAGCCACACC
(RNA)
SEQ ID NO: 318
CΨCGAGCΨGGΨACΨGCAΨGCACGCAAΨGCΨAGCΨGCCCCΨΨΨCCCGΨCCΨ
GGGΨACCCCGAGΨCΨCCCCCGACCΨCGGGΨCCCAGGΨAΨGCΨCCCACCΨC
CACCΨGCCCCACΨCACCACCΨCΨGCΨAGΨΨCCAGACACCΨCCCAAGCACG
CAGCAAΨGCAGCΨCAAAACGCΨΨAGCCΨAGCCACACCCCCACGGGAAACA
GCAGΨGAΨΨAACCΨΨΨAGCAAΨAAACGAAAGΨΨΨAACΨAAGCΨAΨACΨAA
CCCCAGGGΨΨGGΨCAAΨΨΨCGΨGCCAGCCACACC

[0217] D. Open Reading Frame (ORF)

[0218] The 5′ and 3′ UTRs may be operably linked to an open reading frame (ORF), which may be a sequence of codons that is capable of being translated into a polypeptide of interest. An open reading frame may be a sequence of several DNA or RNA nucleotide triplets, which may be translated into a peptide or protein. An ORF may begin with a start codon, e.g., a combination of three subsequent nucleotides coding usually for the amino acid methionine (ATG or AUG), at its 5′ end and a subsequent region, which usually exhibits a length which is a multiple of 3 nucleotides. An open reading frame may terminate with at least one stop codon, including but not limited to TAA, TAG, TGA or UAA, UAG or UGA, or any combination thereof. In some aspects, an open reading frame may terminate with one, two, three, four or more stop codons, including but not limited to TAATAA (SEQ ID NO: 289), TAATAG (SEQ ID NO: 290), TAATGA (SEQ ID NO: 291), TAGTGA (SEQ ID NO: 292), TAGTAA (SEQ ID NO: 293), TAGTAG (SEQ ID NO: 294), TGATGA (SEQ ID NO: 295), TGATAG (SEQ ID NO: 296), TGATAA (SEQ ID NO: 297) or UAAUAA (SEQ ID NO: 298), UAAUAG (SEQ ID NO: 299), UAAUGA (SEQ ID NO: 300), UAGUGA (SEQ ID NO: 301), UAGUAA (SEQ ID NO: 302), UAGUAG (SEQ ID NO: 303), UGAUGA (SEQ ID NO: 304), UGAUAG (SEQ ID NO: 305), UGAUAA (SEQ ID NO: 306), or any combination thereof. An open reading frame may be isolated or it may be incorporated in a longer nucleic acid sequence, e.g. in a vector or an mRNA. An open reading frame may also be termed “(protein) coding region” or “coding sequence”.

[0219] As stated herein, the RNA molecule may include one (monocistronic), two (bicistronic) or more (multicistronic) open reading frames.

[0220] In some aspects, the ORF encodes a non-structural viral gene. In some aspects, the ORF further includes one or more subgenomic promoters. In some aspects, the RNA molecule includes a subgenomic promoter operably linked to the ORF. In some aspects, a first RNA molecule does not include an ORF encoding any polypeptide of interest, whereas a second RNA molecule includes an ORF encoding a polypeptide of interest. In some aspects, the first RNA molecule does not include a subgenomic promoter.

[0221] The present disclosure provides for an RNA molecule comprising at least one open reading frame encoding a varicella-zoster virus (VZV) polypeptide. In some aspects, an RNA molecule comprising at least one open reading frame encoding a VZV gE polypeptide.

[0222] E. Genes of Interest

[0223] The RNA molecules described herein may include a gene of interest. The gene of interest encodes a polypeptide of interest. Non-limiting examples of polypeptides of interest include, e.g., biologics, antibodies, vaccines, therapeutic polypeptides or peptides, cell penetrating peptides, secreted polypeptides, plasma membrane polypeptides, cytoplasmic or cytoskeletal polypeptides, intracellular membrane bound polypeptides, nuclear polypeptides, polypeptides associated with human disease, targeting moieties, those polypeptides encoded by the human genome for which no therapeutic indication has been identified but which nonetheless have utility in areas of research and discovery, or combinations thereof. The sequence for a particular gene of interest is readily identified by one of skill in the art using public and private databases, e.g., GENBANK®.

[0224] In some aspects, the RNA molecules include a coding region for a gene of interest. In some aspects, a gene of interest is or comprises an antigenic polypeptide or an immunogenic variant or an immunogenic fragment thereof. In some aspects, an antigenic polypeptide comprises one epitope from an antigen. In some aspects, an antigenic polypeptide comprises a plurality of distinct epitopes from an antigen. In some aspects, an antigenic polypeptide comprising a plurality of distinct epitopes from an antigen is polyepitopic. In some aspects, an antigenic polypeptide comprises: an antigenic polypeptide from an allergen, a viral antigenic polypeptide, a bacterial antigenic polypeptide, a fungal antigenic polypeptide, a parasitic antigenic polypeptide, an antigenic polypeptide from an infectious agent, an antigenic polypeptide from a pathogen, a tumor antigenic polypeptide, or a self-antigenic polypeptide.

[0225] The term “antigen” may refer to a substance, which is capable of being recognized by the immune system, e.g. by the adaptive immune system, and which is capable of eliciting an antigen-specific immune response, e.g. by formation of antibodies and/or antigen-specific T cells as part of an adaptive immune response. An antigen may be or may comprise a peptide or protein, which may be presented by the MHC to T-cells. An antigen may be the product of translation of a provided nucleic acid molecule, e.g. an RNA molecule comprising at least one coding sequence as described herein. In addition, fragments, variants and derivatives of an antigen, such as a peptide or a protein, comprising at least one epitope are understood as antigens.

[0226] In some aspects, an RNA encoding a gene of interest, e.g., an antigen, is expressed in cells of a subject treated to provide a gene of interest, e.g., an antigen. In some aspects, the RNA is transiently expressed in cells of the subject. In some aspects, expression of a gene of interest, e.g., an antigen, is at the cell surface. In some aspects, a gene of interest, e.g., an antigen, is expressed and presented in the context of MHC. In some aspects, expression of a gene of interest, e.g., an antigen, is into the extracellular space, e.g., the antigen is secreted.

[0227] In some aspects, the RNA molecules include a coding region for a gene of interest, e.g., an antigen. In some aspects, the RNA molecules include a coding region for a gene of interest, e.g., an antigen, that is derived from a pathogen associated with an infectious disease. In some aspects, the RNA molecules include a coding region for a gene of interest, e.g., an antigen, that is derived from varicella zoster virus (VZV).

[0228] In some aspects, the RNA molecule encodes a VZV gE protein or a fragment or a variant thereof. In some aspects, the RNA molecule encodes a VZV gE protein comprising the amino acid sequence according to any one of GENBANK® Accession No.: AAG32558.1, ABE03086.1, AAK01047.1, Q9J3M8.1, AEW88548.1, AGY33616.1, AEW89124.1, AIT53150.1, CAA25033.1, NP_040190.1, AKG56356.1, AEW89412.1, ABF21714.1, ABF21714.1, AAT07749.1, AEW88764.1, AAG48520.1, and/or AEW88980.1, the respective sequences of which are herein incorporated by reference. In some aspects, the RNA molecule encodes a VZV gE protein comprising the amino acid sequence according to GENBANK® Accession No. AH009994.2, the sequence of which is herein incorporated by reference.

[0229] In some aspects, an RNA polynucleotide described herein or a composition or medical preparation comprising the same comprises a nucleotide sequence disclosed herein. In some aspects, an RNA polynucleotide comprises a sequence having at least 80% identity to a nucleotide sequence disclosed herein. In some aspects, an RNA polynucleotide comprises a sequence encoding a polypeptide having at least 80% identity to a polypeptide sequence disclosed herein. In some aspects, an RNA polynucleotide described herein or a composition or medical preparation comprising the same is transcribed by a DNA template. In some aspects, a DNA template used to transcribe an RNA polynucleotide described herein comprises a sequence complementary to an RNA polynucleotide. In some aspects, a gene of interest described herein is encoded by an RNA polynucleotide described herein comprising a nucleotide sequence disclosed herein. In some aspects, an RNA polynucleotide encodes a polypeptide having at least 80% identity to a polypeptide sequence disclosed herein. In some aspects, a polypeptide described herein is encoded by an RNA polynucleotide transcribed by a DNA template comprising a sequence complementary to an RNA polynucleotide.

[0230] In some aspects, the RNA molecule encodes a VZV glycoprotein comprising the sequence of any one of SEQ ID NOs: 1-11, or a fragment or variant thereof.

[0231] In some aspects, the RNA molecule encodes a VZV glycoprotein synthesized from the nucleic acid sequence comprising any one of SEQ ID NOs: 12-145, or fragment or variant thereof.

[0232] F. Poly-A Tail

[0233] In some aspects, an RNA molecules disclosed herein comprise a poly-adenylate (poly-A) sequence, e.g., as described herein. In some aspects, a poly-A sequence is situated downstream of a 3′ UTR, e.g., adjacent to a 3′ UTR. A “poly-A tail” or “poly-A sequence” refers to a stretch of consecutive adenine residues, which may be attached to the 3′ end of the RNA molecule. Poly-A sequences are known to those of skill in the art and may follow the 3′ UTR in the RNA molecules described herein. The poly-A tail may increase the half-life of the RNA molecule.

[0234] RNA molecules disclosed herein may have a poly-A sequence attached to the free 3′-end of the RNA by a template-independent RNA polymerase after transcription or a poly-A sequence encoded by DNA and transcribed by a template-dependent RNA polymerase. In some aspects, a poly-A sequence is attached during RNA transcription, e.g., during preparation of in vitro transcribed RNA, based on a DNA template comprising repeated dT nucleotides (deoxythymidylate) in the strand complementary to the coding strand.

[0235] The DNA sequence encoding a poly-A sequence (coding strand) is referred to as poly-A cassette. In some aspects, the poly-A cassette present in the coding strand of DNA essentially consists of dA nucleotides, but is interrupted by a random sequence of the four nucleotides (dA, dC, dG, and dT). Such a random sequence may be at least, at most, exactly, or between any two of 5, 6, 7, 8, 9, 10, 11, 12, 13, 14, 15, 16, 17, 18, 19, 20, 21, 22, 23, 24, 25, 26, 27, 28, 29, 30, 31, 32, 33, 34, 35, 36, 37, 38, 39, 40, 41, 42, 43, 44, 45, 46, 47, 48, 49, or 50 nucleotides in length. Such a cassette is disclosed in WO 2016/005324 A1, hereby incorporated by reference. Any poly-A cassette disclosed in WO 2016/005324 A1 may be used in the present invention. A poly-A cassette that essentially consists of dA nucleotides, but is interrupted by a random sequence having an equal distribution of the four nucleotides (dA, dC, dG, dT) and having a length of e.g., 5 to 50 nucleotides, shows, on DNA level, constant propagation of plasmid DNA in E. coli and is still associated, on RNA level, with the beneficial properties with respect to supporting RNA stability and translational efficiency is encompassed. In some aspects, the poly-A sequence contained in an RNA polynucleotide described herein essentially consists of adenosine nucleotides, but is interrupted by a random sequence of the four nucleotides (A, C, G, U). Such a random sequence may be at least, at most, exactly, or between any two of 5, 6, 7, 8, 9, 10, 11, 12, 13, 14, 15, 16, 17, 18, 19, 20, 21, 22, 23, 24, 25, 26, 27, 28, 29, 30, 31, 32, 33, 34, 35, 36, 37, 38, 39, 40, 41, 42, 43, 44, 45, 46, 47, 48, 49, or 50 nucleotides in length.

[0236] In some aspects, no nucleotides other than adenosine nucleotides flank a poly-A sequence at its 3′-end, e.g., the poly-A sequence, is not masked or followed at its 3′-end by a nucleotide other than adenosine.

[0237] In some aspects, the RNA molecule may further include an endonuclease recognition site sequence immediately downstream of the poly-A tail sequence. The RNA molecule may further include a poly-A polymerase recognition sequence (e.g. AAUAAA) near its 3′ end.

[0238] The poly-A sequence may be of any length. In some aspects, the poly-A tail may include 5 to 300 nucleotides in length. In some aspects, the RNA molecule includes a poly-A tail that comprises, essentially consists of, or consists of a sequence of about 25 to about 400 adenosine nucleotides, a sequence of about 50 to about 400 adenosine nucleotides, a sequence of about 50 to about 300 adenosine nucleotides, a sequence of about 50 to about 250 adenosine nucleotides, a sequence of about 60 to about 250 adenosine nucleotides, or a sequence of about 40 to about 100 adenosine nucleotides. In some aspects, the poly-A tail comprises, essentially consists of, or consists of at least, at most, exactly, or between any two of 5, 10, 15, 20, 25, 30, 35, 40, 45, 50, 55, 60, 65, 70, 75, 80, 85, 90, 91, 92, 93, 94, 95, 96, 97, 98, 99, 100, 105, 110, 115, 120, 125, 130, 135, 140, 145, 150, 155, 160, 165, 170, 175, 180, 185, 190, 195, 200, 205, 210, 215, 220, 225, 230, 235, 240, 245, 250, 255, 260, 265, 270, 275, 280, 285, 290, 295, 300, 305, 310, 315, 320, 325, 330, 335, 340, 345, 350, 355, 360, 365, 370, 375, 380, 385, 390, 395, 400, 405, 410, 415, 420, 425, 430, 435, 440, 445, 450, 455, 460, 465, 470, 475, 480, 485, 490, 495, or 500 adenosine nucleotides. In this context, “essentially consists of” means that most nucleotides in the poly-A sequence, typically at least 75%, at least 80%, at least 85%, at least 90%, at least 95%, at least 96%, at least 97%, at least 98%, or at least 99% by number of nucleotides in the poly-A sequence are adenosine nucleotides, but permits that remaining nucleotides are nucleotides other than adenosine nucleotides, such as uridine, guanosine, or cytosine. In this context, “consists of” means that all nucleotides in the poly-A sequence, e.g., 100% by number of nucleotides in the poly-A sequence, are adenosine nucleotides.

[0239] In some aspects, the RNA molecule includes a poly-A tail that includes a sequence of greater than 30 adenosine nucleotides. In some aspects, the RNA molecule includes a poly-A tail that includes about 40 adenosine nucleotides. In some aspects, the RNA molecule includes a poly-A tail that includes about 80 adenosine nucleotides. In some aspects, the 3′ poly-A tail has a stretch of at least 10 consecutive adenosine residues and at most 300 consecutive adenosine residues. In some specific aspects, the RNA molecule includes about 40 consecutive adenosine residues. In some aspects, the RNA molecule includes about 80 consecutive adenosine residues. Poly-A tails may play key regulatory roles in enhancing translation efficiency and regulating the efficiency of mRNA quality control and degradation. Short sequences or hyperpolyadenylation may signal for RNA degradation. Some designs include a poly-A tails of about 40 adenosine nucleotides, about adenosine nucleotides.

[0240] In some aspects, a poly-A tail may be located within an RNA molecule or other nucleic acid molecule, such as, e.g., in a vector, for example, in a vector serving as template for the generation of an RNA, e.g. an mRNA, e.g., by transcription of the vector. In some aspects, the RNA molecule may not include a poly-A tail.

[0241] In one aspect, a DNA encoding a poly-A tail disclosed herein comprises a sequence having at least, at most, exactly, or between any two of 99%, 98%, 97%, 96%, 95%, 90%, 85%, or 80% identity to SEQ ID NO: 286. In one aspect, the DNA encoding the poly-A tail comprises a sequence of SEQ ID NO: 286. In one aspect, an RNA disclosed herein comprises a poly-A tail comprising a sequence having at least, at most, exactly, or between any two of 99%, 98%, 97%, 96%, 95%, 90%, 85%, or 80% identity to any of SEQ ID NO: 287 to 288 and 315 to 316. In one aspect, the poly-A tail comprises a sequence of any of SEQ ID NO: 287 to 288+/−2 adenosine (A) nucleotides. In one aspect, the poly-A tail comprises a sequence of any of SEQ ID NO: 287 to 288+/−1 adenosine (A) nucleotides. In one aspect, the poly-A tail comprises a sequence of any of SEQ ID NO: 287 to 288. In one aspect, the poly-A tail comprises a sequence of any of SEQ ID NO: 315 to 316+/−2 adenosine (A) nucleotides. In one aspect, the poly-A tail comprises a sequence of any of SEQ ID NO: 315 to 316+/−1 adenosine (A) nucleotides. In one aspects, the poly-A tail comprises a sequence of any of SEQ ID NO: 315 to 316.

(DNA)
SEQ ID NO: 286
AAAAAAAAAAAAAAAAAAAAAAAAAAAAAAGCATATGACTAAAAAAAAA
AAAAAAAAAAAAAAAAAAAAAAAAAAAAAAAAAAAAAAAAAAAAAAAAA
AAAAAAAAAAAA
(RNA)
SEQ ID NO: 287
AAAAAAAAAAAAAAAAAAAAAAAAAAAAAAGCAUAUGACUAAAAAAAAA
AAAAAAAAAAAAAAAAAAAAAAAAAAAAAAAAAAAAAAAAAAAAAAAAA
AAAAAAAAAAAA
(RNA)
SEQ ID NO: 288
AAAAAAAAAAAAAAAAAAAAAAAAAAAAAAGCAΨAΨGACΨAAAAAAAAA
AAAAAAAAAAAAAAAAAAAAAAAAAAAAAAAAAAAAAAAAAAAAAAAAA
AAAAAAAAAAAA
(RNA)
SEQ ID NO: 315
AAAAAAAAAAAAAAAAAAAAAAAAAAAAAAGCAUAUGACUAAAAAAAAA
AAAAAAAAAAAAAAAAAAAAAAAAAAAAAAAAAAAAAAAAAAAAAAAAA
AAAAAAAAAAA
(RNA)
SEQ ID NO: 316
AAAAAAAAAAAAAAAAAAAAAAAAAAAAAAGCAΨAΨGACΨAAAAAAAAA
AAAAAAAAAAAAAAAAAAAAAAAAAAAAAAAAAAAAAAAAAAAAAAAAA
AAAAAAAAAAA

[0242] G. Self-Amplifying RNA (SARNA)

[0243] In some aspects, the RNA molecule may be an saRNA. “Self-amplifying RNA,” “self-amplifying RNA,” and “replicon” refer to RNA with the ability to replicate itself. Self-amplifying RNA molecules may be produced by using replication elements derived from, e.g. alphaviruses, and substituting the structural viral polypeptides with a nucleotide sequence encoding a polypeptide of interest. A self-amplifying RNA molecule is typically a positive-strand molecule that may be directly translated after delivery to a cell, and this translation provides an RNA-dependent RNA polymerase which then produces both antisense and sense transcripts from the delivered RNA. The delivered RNA leads to the production of multiple daughter RNA molecules. These daughter RNA molecules, as well as collinear subgenomic transcripts, may be translated themselves to provide in situ expression of an encoded gene of interest, e.g., a viral antigen, or may be transcribed to provide further transcripts with the same sense as the delivered RNA which are translated to provide in situ expression of the antigen. The overall result of this sequence of transcriptions is an amplification in the number of the introduced saRNA molecules and so the encoded gene of interest, e.g., a viral antigen, becomes a major polypeptide product of the cells.

[0244] In some aspects, the self-amplifying RNA includes at least one or more genes including any one of viral replicases, viral proteases, viral helicases and other nonstructural viral proteins, or combination thereof. In some aspects, the self-amplifying RNA may also include 5′- and 3′-end tractive replication sequences, and optionally a heterologous sequence that encodes a desired amino acid sequence (e.g., an antigen of interest). A subgenomic promoter that directs expression of the heterologous sequence may be included in the self-amplifying RNA. Optionally, the heterologous sequence (e.g., an antigen of interest) may be fused in frame to other coding regions in the self-amplifying RNA and/or may be under the control of an internal ribosome entry site (IRES).

[0245] In some aspects, a self-amplifying RNA molecule described herein encodes (i) an RNA-dependent RNA polymerase that may transcribe RNA from the self-amplifying RNA molecule and (ii) a polypeptide of interest, e.g., a viral antigen. In some aspects, the polymerase may be an alphavirus replicase, e.g., including any one of alphavirus protein nsP1, nsP2, nsP3, nsP4, and any combination thereof.

[0246] In some aspects, the self-amplifying RNA molecule may have two open reading frames. The first (5′) open reading frame may encode a replicase; the second (3′) open reading frame may encode a polypeptide comprising an antigen of interest. In some aspects the RNA may have additional (e.g., downstream) open reading frames, e.g., to encode further antigens or to encode accessory polypeptides.

[0247] In some aspects, the saRNA molecule further includes (1) an alphavirus 5′ replication recognition sequence, and (2) an alphavirus 3′ replication recognition sequence. In some aspects, the 5′ sequence of the self-amplifying RNA molecule is selected to ensure compatibility with the encoded replicase.

[0248] In some aspects, the self-amplifying RNA molecule may encode a single polypeptide antigen or, optionally, two or more of polypeptide antigens linked together in a way that each of the sequences retains its identity (e.g., linked in series) when expressed as an amino acid sequence. The polypeptides generated from the self-amplifying RNA may then be produced as a fusion polypeptide or engineered in such a manner to result in separate polypeptide or peptide sequences.

[0249] In some aspects, the self-amplifying RNA described herein may encode one or more polypeptide antigens that include a range of epitopes. In some aspects, the self-amplifying RNA described herein may encode epitopes capable of eliciting either a helper T-cell response or a cytotoxic T-cell response or both.

### IV. RNA Transcription

[0250] In some aspects, the RNA disclosed herein is produced by in vitro transcription or chemical synthesis. In the context of the present disclosure, the term “transcription” relates to a process, wherein the genetic code in a DNA sequence is transcribed into RNA. Subsequently, the RNA may be translated into peptide or protein.

[0251] According to the present disclosure, “transcription” comprises “in vitro transcription” or “IVT,” which refers to the process whereby transcription occurs in vitro in a non-cellular system to produce a synthetic RNA product for use in various applications, including, e.g., production of protein or polypeptides. Cloning vectors may be applied for the generation of transcripts. These cloning vectors are generally designated as transcription vectors and are according to the present invention encompassed by the term “vector.” According to specific aspects, the RNA used is in vitro transcribed RNA (IVT-RNA) and may be obtained by in vitro transcription of an appropriate DNA template. The promoter for controlling transcription may be any promoter for any RNA polymerase. Particular examples of RNA polymerases are the T7, T3, and SP6 RNA polymerases. Preferably, the in vitro transcription according to the invention is controlled by a T7 or SP6 promoter. A DNA template for in vitro transcription may be obtained by cloning of a nucleic acid, in particular cDNA, and introducing it into an appropriate vector for in vitro transcription. The cDNA may be obtained by reverse transcription of RNA.

[0252] Synthetic IVT RNA products may be translated in vitro or introduced directly into cells, where they may be translated. With respect to RNA, the term “expression” or “translation” relates to the process in the ribosomes of a cell by which a strand of mRNA directs the assembly of a sequence of amino acids to make a peptide or protein. Such synthetic RNA products include, e.g., but are not limited to mRNA molecules, saRNA molecules, antisense RNA molecules, shRNA molecules, long non-coding RNA molecules, ribozymes, aptamers, guide RNA molecules (e.g., for CRISPR), ribosomal RNA molecules, small nuclear RNA molecules, small nucleolar RNA molecules, and the like. An IVT reaction typically utilizes a DNA template (e.g., a linear DNA template) as described and/or utilized herein, ribonucleotides (e.g., non-modified ribonucleotide triphosphates or modified ribonucleotide triphosphates), and an appropriate RNA polymerase.

[0253] In some aspects, an mRNA is produced by in vitro transcription using a DNA template where DNA refers to a nucleic acid that contains deoxyribonucleotides. In some aspects, an RNA disclosed herein is in vitro transcribed RNA (IVT-RNA) and may be obtained by in vitro transcription of an appropriate DNA template. The promoter for controlling transcription may be any promoter for any RNA polymerase. A DNA template for in vitro transcription may be obtained by cloning of a nucleic acid, in particular cDNA, and introducing it into an appropriate vector for in vitro transcription. The cDNA may be obtained by reverse transcription of RNA.

[0254] In some aspects, starting material for IVT may include linearized DNA template, nucleotides, RNase inhibitor, pyrophosphatase, and/or T7 RNA polymerase. In some aspects, the IVT process is conducted in a bioreactor. The bioreactor may comprise a mixer. In some aspects, nucleotides may be added into the bioreactor throughout the IVT process.

[0255] In some aspects, one or more post-IVT agents are added into the IVT mixture comprising RNA in the bioreactor after the IVT process. Exemplary post-IVT agents may include DNAse I configured to digest the linearized DNA template, and proteinase K configured to digest DNAse I and T7 RNA polymerase. In some aspects, the post-IVT agents are incubated with the mixture in the bioreactor after IVT. In some aspects, the bioreactor may contain at least, at most, exactly, or between any two of 60, 70, 80, 90, 100, 110, 120, 130, 140, 150,160, 170, 180, 190, 200, 210, 220, 230, 240, 250, 260, 270, 280, 290, 300, 310, 320, 330, 340, 350, 360, 370, 380, 390, 400, 410, 420, 430, 440, 450, 460, 470, 480, 490, and 500 or more liters IVT mixture. The IVT mixture may have an RNA concentration at least, at most, exactly, or between any two of 3.3, 3.4, 3.5, 3.6, 3.7, 3.8, 3.9, 4.0, 4.1, 4.2, 4.3, 4.4, 4.5, 4.6, 4.7, 4.8, 4.9, 5.0, 5.1, 5.2, 5.3, 5.4, 5.5, 5.6, 5.7, 5.8, 5.9, 6.0, 7.0, 8.0, 9.0, 10, 11, 12, 13, 14, 15, 16, 17, 18, 19, 20, 30, 40, 50, 60, 70, 80, 90, and 100 mg/mL or more RNA.

[0256] In some aspects, the IVT mixture may include residual spermidine, residual DNA, residual proteins, peptides, HEPES, EDTA, ammonium sulfate, cations (e.g., Mg2+, Na+, Ca2+), RNA fragments, residual nucleotides, free phosphates, or any combinations thereof.

[0257] In some aspects, at least a portion of the IVT mixture is filtered. The IVT mixture may be filtered via ultrafiltration and/or diafiltration to remove at least some impurities from the IVT mixture and/or to change buffer solution for the at least a portion of IVT mixture to produce a concentrated RNA solution as a retentate.

[0258] In some aspects, both “ultrafiltration” and “diafiltration” refer to a membrane filtration process. Ultrafiltration typically uses membranes having pore sizes of at least, at most, exactly, or between any two of 0.001, 0.002, 0.003, 0.004, 0.005, 0.006, 0.007, 0.008, 0.009, 0.01, 0.02, 0.03, 0.04, 0.05, 0.06, 0.07, 0.08, 0.09, and 0.1 μm. In some aspects, ultrafiltration membranes are typically classified by molecular weight cutoff (MWCO) rather than pore size. For example, the MWCO may be at least, at most, exactly, or between any two of 30 kDa, 40 kDa, 50 kDa, 60 kDa, 70 kDa, 80 kDa, 90 kDa, 100 kDa, 110 kDa, 120 kDa, 130 kDa, 140 kDa, 150 kDa, 160 kDa, 170 kDa, 180 kDa, 190 kDa, 200 kDa, 210 kDa, 220 kDa, 230 kDa, 240 kDa, 250 kDa, 260 kDa, 270 kDa, 280 kDa, 290 kDa, 300 kDa, 310 kDa, 320 kDa, 330 kDa, 340 kDa, 350 kDa, 360 kDa, 370 kDa, 380 kDa, 390 kDa, 400 kDa, 500 kDa, 600 kDa, 700 kDa, 800 kDa, 900 kDa, 1000 kDa, 2000 kDa, 3000 kDa, 4000 kDa, 5000 kDa, 6000 kDa, 7000 kDa, 8000 kDa, 9000 kDa, and 10000 kDa. A skilled artisan will understand that filtration membranes may be of different suitable materials, including, e.g., polymeric, cellulose, ceramic, etc., depending upon the application. In some aspects, membrane filtration may be more desirable for large volume purification process.

[0259] In some aspects, ultrafiltration and diafiltration of the IVT mixture for purifying RNA may include (1) Direct Flow Filtration (DFF), also known as “dead-end” filtration, that applies a feed stream perpendicular to the membrane face and attempts to pass 100% of the fluid through the membrane, and/or (2) Tangential Flow Filtration (TFF), also known as crossflow filtration, where a feed stream passes parallel to the membrane face as one portion passes through the membrane (permeate) while the remainder (retentate) is retained and/or recirculated back to the feed tank.

[0260] In some aspects, the filtering of the IVT mixture is conducted via TFF that comprises an ultrafiltration step, a first diafiltration step, and a second diafiltration step. In some aspects, the first diafiltration step is conducted in the presence of ammonium sulfate. The first diafiltration step may be configured to remove a majority of impurities from the IVT mixture. In some aspects, the second diafiltration step is conducted without ammonium sulfate. The second diafiltration step may be configured to transfer the RNA into a DS buffer formulation.

[0261] A filtration membrane with an appropriate MWCO may be selected for the ultrafiltration in the TFF process. The MWCO of a TFF membrane determines which solutes may pass through the membrane into the filtrate and which are retained in the retentate. The MWCO of a TFF membrane may be selected such that substantially all of the solutes of interest (e.g., desired synthesized RNA species) remains in the retentate, whereas undesired components (e.g., excess ribonucleotides, small nucleic acid fragments such as digested or hydrolyzed DNA template, peptide fragments such as digested proteins and/or other impurities) pass into the filtrate. In some aspects, the retentate comprising desired synthesized RNA species may be re-circulated to a feed reservoir to be re-filtered in additional cycles. In some aspects, a TFF membrane may have a MWCO equal to at least, at most, exactly, or between any two of 30 kDa, 40 kDa, 50 kDa, 60 kDa, 70 kDa, 80 kDa, 90 kDa, or more. In some aspects, a TFF membrane may have a MWCO equal to at least, at most, exactly, or between any two of 100 kDa, 150 kDa, 200 kDa, 250 kDa, 300 kDa, 350 kDa, 400 kDa, or more. In some aspects, a TFF membrane may have a MWCO of about 250-350 kDa. In some aspects, a TFF membrane (e.g., a cellulose-based membrane) may have a MWCO of about 30-300 kDa; in some aspects about 50-300 kDa, about 100-300 kDa, or about 200-300 kDa.

[0262] Diafiltration may be performed either discontinuously, or alternatively, continuously. For example, in continuous diafiltration, a diafiltration solution may be added to a sample feed reservoir at the same rate as filtrate is generated. In this way, the volume in the sample reservoir remains constant but small molecules (e.g., salts, solvents, etc.) that may freely permeate through a membrane are removed. Using solvent removal as an example, each additional diafiltration volume (DV) reduces the solvent concentration further. In discontinuous diafiltration, a solution is first diluted and then concentrated back to the starting volume. This process is then repeated until the desired concentration of small molecules (e.g. salts, solvents, etc.) remaining in the reservoir is reached. Each additional diafiltration volume (DV) reduces the small molecule (e.g., solvent) concentration further. Continuous diafiltration typically requires a minimum volume for a given reduction of molecules to be filtered. Discontinuous diafiltration, on the other hand, permits fast changes of the retentate condition, such as pH, salt content, and the like. In some aspects, the first diafiltration step is conducted with diavolumes equal to at least, at most, exactly, or between any two of 2, 3, 4, 5, 6, 7, 8, 9, 10, or more. In some aspects, the second diafiltration step is conducted with diavolumes equal to at least, at most, exactly, or between any two of 5, 6, 7, 8, 9, 10, 11, 12, 13, 14, 15, 16, 17, 18, 19, 20, or more. In some aspects, the first diafiltration step is conducted with 5 diavolumes, and second diafiltration step is conducted with 10 diavolumes.

[0263] In some aspects, for the ultrafiltration and/or diafiltration, the IVT mixture is filtered at a rate equal to at least, at most, exactly, or between any two of 100, 110, 120, 130, 140, 150, 160, 170, 180, 190, 200, 210, 220, 230, 240, 250, 260, 270, 280, 290, 300, 310, 320, 330, 340, 350, 360, 370, 380, 390, 400, 410, 420, 430, 440, 450, 500, 600, 700, 800, 900, or 1000 L/m2 of filter area per hour, or more. The concentrated RNA solution may comprise at least, at most, exactly, or between any two of 2.0, 2.1, 2.2, 2.3, 2.4, or 2.5 mg/mL single stranded RNA.

[0264] The bioburden of the concentrated RNA solution via filtration to obtain an RNA product solution may also be reduced, in some aspects. The filtration for reducing bioburden may be conducted using one or more filters. The one or more filters may include a filter with a pore size of at least, at most, exactly, or between any two of 0.2 μm, 0.45 μm, 0.65 μm, 0.8 μm, or any other pore size configured to remove bioburdens.

[0265] As one example, reducing the bioburden may include draining a retentate tank containing retentate obtained from the ultrafiltration and/or diafiltration to obtain the retentate. Reducing the bioburden may include flushing a filtration system for ultrafiltration and/or diafiltration using a wash buffer solution to obtain a wash pool solution comprising residue RNA remaining in the filtration system. The retentate may be filtered to obtain a filtered retentate. The wash pool solution may be filtered using a first 0.2 μm filter to obtain a filtered wash pool solution. The retentate may be filtered using the first 0.2 μm filter or another 0.2 μm filter.

[0266] The filtered wash pool solution and the filtered retentate may be combined to form a combined pool solution. The combined pool solution may be filtered using a second 0.2 μm filter to obtain a filtered combined pool solution, which is further filtered using a third 0.2 μm filter to produce an RNA product solution.

### V. RNA Encapsulation

[0267] The RNA in an RNA product solution may be encapsulated, and the RNA solution may further comprise at least one encapsulating agent. In one aspect, the encapsulating agent comprises a lipid, a lipid nanoparticle (LNP), lipoplexes, polymeric particles, polyplexes, and monolithic delivery systems, and a combination thereof.

[0268] In one aspect, the encapsulating agent is a lipid, and produced is lipid nanoparticle (LNP)-encapsulated RNA. Without intending to be bound by any theory, it is believed that the cationic or cationically ionizable lipid or lipid-like material and/or the cationic polymer combine together with the nucleic acid to form aggregates, and this aggregation results in colloidally stable particles. A lipid may be a naturally occurring lipid or a synthetic lipid. However, a lipid is usually a biological substance. Biological lipids are well known in the art, and include for example, neutral fats, phospholipids, phosphoglycerides, steroids, terpenes, lysolipids, glycosphingolipids, glucolipids, sulphatides, lipids with ether and ester-linked fatty acids and polymerizable lipids, and combinations thereof. A lipid is a substance that is insoluble in water and extractable with an organic solvent. Compounds other than those specifically described herein are understood by one of skill in the art as lipids, and are encompassed by the compositions and methods of the present disclosure. A lipid component and a non-lipid may be attached to one another, either covalently or non-covalently.

[0269] In some aspects, LNPs may be designed to protect RNA molecules (e.g., saRNA, mRNA) from extracellular RNases and/or may be engineered for systemic delivery of the RNA to target cells. In some aspects, such LNPs may be particularly useful to deliver RNA molecules (e.g., saRNA, mRNA) when RNA molecules are intravenously administered to a subject in need thereof. In some aspects, such LNPs may be particularly useful to deliver RNA molecules (e.g., saRNA, mRNA) when RNA molecules are intramuscularly administered to a subject in need thereof.

[0270] In one aspect, the RNA in the RNA solution is at a concentration of <1 mg/mL. In another aspect, the RNA is at a concentration of at least about 0.05 mg/mL. In another aspect, the RNA is at a concentration of at least about 0.5 mg/mL. In another aspect, the RNA is at a concentration of at least about 1 mg/mL. In another aspect, the RNA concentration is from about 0.05 mg/mL to about 0.5 mg/mL. In another aspect, the RNA is at a concentration of at least 10 mg/mL. In another aspect, the RNA is at a concentration of at least 50 mg/mL. In some aspects, the RNA is at a concentration of at least, at most, exactly, or between any two of about 0.05 mg/mL, 0.5 mg/mL, 1 mg/mL, 10 mg/mL, 50 mg/mL, 75 mg/mL, 100 mg/mL, 150 mg/mL, 200 mg/mL, 250 mg/mL, 300 mg/mL, 400 mg/mL, or more.

[0271] The present disclosure provides for an RNA solution and lipid preparation mixture or compositions thereof comprising at least one RNA encoding, e.g., an antigen (e.g., a VZV polypeptide) complexed with, encapsulated in, and/or formulated with one or more lipids, and forming lipid nanoparticles (LNPs), liposomes, lipoplexes and/or nanoliposomes. In some aspects, the composition comprises a lipid nanoparticle.

[0272] A lipid nanoparticle or LNP refers to particles of any morphology generated when a cationic lipid and optionally one or more further lipids are combined, e.g. in an aqueous environment and/or in the presence of RNA. In some aspects, lipid nanoparticles are included in a formulation that may be used to deliver an active agent or therapeutic agent, such as a nucleic acid (e.g., mRNA) to a target site of interest (e.g., cell, tissue, organ, tumor, and the like). In some aspects, the lipid nanoparticles of the present disclosure comprise a nucleic acid. Such lipid nanoparticles typically comprise a cationic lipid and one or more excipients, e.g., one or more neutral lipids, charged lipids, steroids, polymer conjugated lipids, or combinations thereof. In some aspects, the active agent or therapeutic agent, such as a nucleic acid (e.g., mRNA), may be encapsulated in the lipid portion of the lipid nanoparticle or an aqueous space enveloped by some or all of the lipid portion of the lipid nanoparticle, thereby protecting it from enzymatic degradation or other undesirable effects induced by the mechanisms of the host organism or cells e.g. an adverse immune response. The nucleic acid (e.g., mRNA) or a portion thereof may also be associated and complexed with the lipid nanoparticle. A lipid nanoparticle may comprise any lipid capable of forming a particle to which the nucleic acids are attached, or in which the one or more nucleic acids are encapsulated.

[0273] In some aspects, provided RNA molecules (e.g., saRNA, mRNA) may be formulated with LNPs. In some aspects, the lipid nanoparticles may have a mean diameter of about 1 to 500 nm. In some aspects, the lipid nanoparticles have a mean diameter of from about 30 nm to about 150 nm, from about 40 nm to about 150 nm, from about 50 nm to about 150 nm, from about 60 nm to about 130 nm, from about 70 nm to about 110 nm, from about 70 nm to about 100 nm, from about 80 nm to about 100 nm, from about 90 nm to about 100 nm, from about 70 to about 90 nm, from about 80 nm to about 90 nm, from about 70 nm to about 80 nm, or at least, at most, exactly, or between any two of 30 nm, 35 nm, 40 nm, 45 nm, 50 nm, 55 nm, 60 nm, 65 nm, 70 nm, 75 nm, 80 nm, 85 nm, 90 nm, 95 nm, 100 nm, 105 nm, 110 nm, 115 nm, 120 nm, 125 nm, 130 nm, 135 nm, 140 nm, 145 nm, or 150 nm, and are substantially non-toxic. The term “mean diameter” refers to the mean hydrodynamic diameter of particles as measured by dynamic laser light scattering (DLS) with data analysis using the so-called cumulant algorithm, which provides as results the so-called Z-average with the dimension of a length, and the polydispersity index (PI), which is dimensionless (Koppel, D., J. Chem. Phys. 57, 1972, pp 4814-4820, ISO 13321). Here, “mean diameter,” “diameter,” or “size” for particles is used synonymously with this value of the Z-average.

[0274] LNPs described herein may exhibit a polydispersity index less than about 0.5, less than about 0.4, less than about 0.3, or about 0.2 or less. By way of example, the LNPs may exhibit a polydispersity index of at least, at most, exactly, or between any two of 0.1, 0.11, 0.12, 0.13, 0.14, 0.15, 0.16, 0.17, 0.18, 0.19, 0.2, 0.21, 0.22, 0.23, 0.24, 0.25, 0.26, 0.27, 0.28, 0.29, 0.3, 0.31, 0.32, 0.33, 0.34, 0.35, 0.36, 0.37, 0.38, 0.39, 0.4, 0.41, 0.42, 0.43, 0.44, 0.45, 0.46, 0.47, 0.48, 0.49, or 0.5. The polydispersity index is, in some aspects, calculated based on dynamic light scattering measurements by the so-called cumulant analysis as mentioned in the definition of the “average diameter.” Under certain prerequisites, it may be taken as a measure of the size distribution of an ensemble of nanoparticles.

[0275] In certain aspects, nucleic acids (e.g., RNA molecules), when present in provided LNPs, are resistant in aqueous solution to degradation with a nuclease. In some aspects, LNPs are liver-targeting lipid nanoparticles. In some aspects, LNPs are cationic lipid nanoparticles comprising one or more cationic lipids (e.g., ones described herein). In some aspects, cationic LNPs may comprise at least one cationic lipid, at least one polymer conjugated lipid, and at least one helper lipid (e.g., at least one neutral lipid).

[0276] In certain aspects, the RNA solution and lipid preparation mixture or compositions thereof may have, have at least, or have at least, at most, exactly, or between any two of about 1%, about 2%, about 3%, about 4% about 5%, about 6%, about 7%, about 8%, about 9%, about 10%, about 11%, about 12%, about 13%, about 14%, about 15%, about 16%, about 17%, about 18%, about 19%, about 20%, about 21%, about 22%, about 23%, about 24%, about 25%, about 26%, about 27%, about 28%, about 29%, about 30%, about 31%, about 32%, about 33%, about 34%, about 35%, about 36%, about 37%, about 38%, about 39%, about 40%, about 41%, about 42%, about 43%, about 44%, about 45%, about 46%, about 47%, about 48%, about 49%, about 50%, about 51%, about 52%, about 53%, about 54%, about 55%, about 56%, about 57%, about 58%, about 59%, about 60%, about 61%, about 62%, about 63%, about 64%, about 65%, about 66%, about 67%, about 68%, about 69%, about 70%, about 71%, about 72%, about 73%, about 74%, about 75%, about 76%, about 77%, about 78%, about 79%, about 80%, about 81%, about 82%, about 83%, about 84%, about 85%, about 86%, about 87%, about 88%, about 89%, about 90%, about 91%, about 92%, about 93%, about 94%, about 95%, about 96%, about 97%, about 98%, or about 99% of a particular lipid, lipid type, or non-lipid component such as lipid-like materials and/or cationic polymers or an adjuvant, antigen, peptide, polypeptide, sugar, nucleic acid or other material disclosed herein or as would be known to one of skill in the art.

[0277] LNPs described herein may be prepared using a wide range of methods that may involve obtaining a colloid from at least one cationic or cationically ionizable lipid or lipid-like material and/or at least one cationic polymer and mixing the colloid with nucleic acid to obtain nucleic acid particles. The term “colloid” as used herein relates to a type of homogeneous mixture in which dispersed particles do not settle out. The insoluble particles in the mixture are microscopic, with particle sizes between 1 and 1000 nanometers. The mixture may be termed a colloid or a colloidal suspension. Sometimes the term “colloid” only refers to the particles in the mixture and not the entire suspension.

[0278] For the preparation of colloids comprising at least one cationic or cationically ionizable lipid or lipid-like material and/or at least one cationic polymer methods are applicable herein that are conventionally used for preparing liposomal vesicles and are appropriately adapted. The most commonly used methods for preparing liposomal vesicles share the following fundamental stages: (i) lipids dissolution in organic solvents, (ii) drying of the resultant solution, and (iii) hydration of dried lipid (using various aqueous media). In the film hydration method, lipids are firstly dissolved in a suitable organic solvent, and dried down to yield a thin film at the bottom of the flask. The obtained lipid film is hydrated using an appropriate aqueous medium to produce a liposomal dispersion. Furthermore, an additional downsizing step may be included.

[0279] Reverse phase evaporation is an alternative method to the film hydration for preparing liposomal vesicles that involves formation of a water-in-oil emulsion between an aqueous phase and an organic phase containing lipids. A brief sonication of this mixture is required for system homogenization. The removal of the organic phase under reduced pressure yields a milky gel that turns subsequently into a liposomal suspension.

[0280] The term “ethanol injection technique” refers to a process, in which an ethanol solution comprising lipids is rapidly injected into an aqueous solution through a needle. This action disperses the lipids throughout the solution and promotes lipid structure formation, for example lipid vesicle formation such as liposome formation. Generally, the RNA lipoplex particles described herein are obtainable by adding RNA to a colloidal liposome dispersion. Using the ethanol injection technique, such colloidal liposome dispersion is, in some aspects, formed as follows: an ethanol solution comprising lipids, such as cationic lipids and additional lipids, is injected into an aqueous solution under stirring. In some aspects, the RNA lipoplex particles described herein are obtainable without a step of extrusion.

[0281] The term “extruding” or “extrusion” refers to the creation of particles having a fixed, cross-sectional profile. In particular, it refers to the downsizing of a particle, whereby the particle is forced through filters with defined pores.

[0282] Other methods having organic solvent free characteristics may also be used according to the present disclosure for preparing a colloid.

[0283] In some aspects, LNP-encapsulated RNA may be produced by rapid mixing of an RNA solution described herein (e.g., the RNA product solution) and a lipid preparation described herein (comprising, e.g., at least one cationic lipid and optionally one or more other lipid components, in an organic solvent) under conditions such that a sudden change in solubility of lipid component(s) is triggered, which drives the lipids towards self-assembly in the form of LNPs. In some aspects, suitable buffering agents comprise tris, histidine, citrate, acetate, phosphate, or succinate. The pH of a liquid formulation relates to the pKa of the encapsulating agent (e.g. cationic lipid). The pH of the acidifying buffer may be at least half a pH scale less than the pKa of the encapsulating agent (e.g. cationic lipid), and the pH of the final buffer may be at least half a pH scale greater than the pKa of the encapsulating agent (e.g. cationic lipid). In some aspects, properties of a cationic lipid are chosen such that nascent formation of particles occurs by association with an oppositely charged backbone of a nucleic acid (e.g., RNA). In this way, particles are formed around the nucleic acid, which, for example, in some aspects, may result in much higher encapsulation efficiency than it is achieved in the absence of interactions between nucleic acids and at least one of the lipid components.

[0284] In certain aspects, nucleic acids, when present in the lipid nanoparticles, are resistant in aqueous solution to degradation with a nuclease. Lipid nanoparticles comprising nucleic acids and their method of preparation are disclosed in, e.g., U.S. Patent Publication Nos. 2004/0142025, 2007/0042031 and PCT Pub. Nos. WO 2013/016058 and WO 2013/086373, the full disclosures of which are herein incorporated by reference in their entirety for all purposes.

[0285] Some aspects described herein relate to compositions, methods and uses involving more than one, e.g., 2, 3, 4, 5, 6 or even more nucleic acid species such as RNA species. In an LNP formulation, it is possible that each nucleic acid species is separately formulated as an individual LNP formulation. In that case, each individual LNP formulation will comprise one nucleic acid species. The individual LNP formulations may be present as separate entities, e.g. in separate containers. Such formulations are obtainable by providing each nucleic acid species separately (typically each in the form of a nucleic acid-containing solution) together with suitable cationic or cationically ionizable lipids or lipid-like materials and cationic polymers that allow the formation of LNPs. Respective particles will contain exclusively the specific nucleic acid species that is being provided when the particles are formed (individual particulate formulations).

[0286] In some aspects, a composition such as a pharmaceutical composition comprises more than one individual LNP formulation. Respective pharmaceutical compositions are referred to as mixed LNP formulations. Mixed LNP formulations according to the invention are obtainable by forming, separately, individual LNP formulations, as described above, followed by a step of mixing of the individual LNP formulations. By the step of mixing, a formulation comprising a mixed population of nucleic acid-containing LNPs is obtainable. Individual LNP populations may be together in one container, comprising a mixed population of individual LNP formulations.

[0287] Alternatively, it is possible that different nucleic acid species are formulated together as a combined LNP formulation. Such formulations are obtainable by providing a combined formulation (typically combined solution) of different RNA species together with suitable cationic or cationically ionizable lipids or lipid-like materials and cationic polymers that allow the formation of LNPs. As opposed to a mixed LNP formulation, a combined LNP formulation will typically comprise LNPs that comprise more than one RNA species. In a combined LNP composition, different RNA species are typically present together in a single particle.

[0288] A. Cationic Polymeric Materials

[0289] Given their high degree of chemical flexibility, polymeric materials are commonly used for nanoparticle-based delivery. Typically, cationic materials are used to electrostatically condense the negatively charged nucleic acid into nanoparticles. These positively charged groups often consist of amines that change their state of protonation in the pH range between 5.5 and 7.5, thought to lead to an ion imbalance that results in endosomal rupture. Polymers such as poly-L-lysine, polyamidoamine, protamine and polyethyleneimine, as well as naturally occurring polymers such as chitosan have all been applied to nucleic acid delivery and are suitable as cationic materials useful in some aspects herein. In addition, some investigators have synthesized polymeric materials specifically for nucleic acid delivery. Poly(P-amino esters), in particular, have gained widespread use in nucleic acid delivery owing to their ease of synthesis and biodegradability. In some aspects, such synthetic materials may be suitable for use as cationic materials herein.

[0290] A “polymeric material,” as used herein, is given its ordinary meaning, e.g., a molecular structure comprising one or more repeat units (monomers), connected by covalent bonds. In some aspects, such repeat units may all be identical; alternatively, in some cases, there may be more than one type of repeat unit present within the polymeric material. In some cases, a polymeric material is biologically derived, e.g., a biopolymer such as a protein. In some cases, additional moieties may also be present in the polymeric material, for example targeting moieties such as those described herein.

[0291] Those skilled in the art are aware that, when more than one type of repeat unit is present within a polymer (or polymeric moiety), then the polymer (or polymeric moiety) is said to be a “copolymer.” In some aspects, a polymer (or polymeric moiety) utilized in accordance with the present disclosure may be a copolymer. Repeat units forming the copolymer may be arranged in any fashion. For example, in some aspects, repeat units may be arranged in a random order; alternatively or additionally, in some aspects, repeat units may be arranged in an alternating order, or as a “block” copolymer, e.g., comprising one or more regions each comprising a first repeat unit (e.g., a first block), and one or more regions each comprising a second repeat unit (e.g., a second block), etc. Block copolymers may have two (a diblock copolymer), three (a triblock copolymer), or more numbers of distinct blocks.

[0292] In certain aspects, a polymeric material for use in accordance with the present disclosure is biocompatible. Biocompatible materials are those that typically do not result in significant cell death at moderate concentrations. In certain aspects, a biocompatible material is biodegradable, e.g., is able to degrade, chemically and/or biologically, within a physiological environment, such as within the body. In certain aspects, a polymeric material may be or comprise protamine or polyalkyleneimine, in particular protamine.

[0293] As those skilled in the art are aware term “protamine” is often used to refer to any of various strongly basic proteins of relatively low molecular weight that are rich in arginine and are found associated especially with DNA in place of somatic histones in the sperm cells of various animals (as fish). In particular, the term “protamine” is often used to refer to proteins found in fish sperm that are strongly basic, are soluble in water, are not coagulated by heat, and yield chiefly arginine upon hydrolysis. In purified form, they are used in a long-acting formulation of insulin and to neutralize the anticoagulant effects of heparin.

[0294] In some aspects, the term “protamine” as used herein is refers to a protamine amino acid sequence obtained or derived from natural or biological sources, including fragments thereof and/or multimeric forms of said amino acid sequence or fragment thereof, as well as (synthesized) polypeptides which are artificial and specifically designed for specific purposes and cannot be isolated from native or biological sources.

[0295] In some aspects, a polyalkyleneimine comprises polyethylenimine and/or polypropylenimine. In some aspects, the polyalkyleneimine is polyethyleneimine (PEI). In some aspects, the polyalkyleneimine is a linear polyalkyleneimine, e.g., linear polyethyleneimine (PEI).

[0296] Cationic materials (e.g., polymeric materials, including polycationic polymers) contemplated for use herein include those which are able to electrostatically bind nucleic acid. In some aspects, cationic polymeric materials contemplated for use herein include any cationic polymeric materials with which nucleic acid may be associated, e.g. by forming complexes with the nucleic acid or forming vesicles in which the nucleic acid is enclosed or encapsulated.

[0297] In some aspects, particles described herein may comprise polymers other than cationic polymers, e.g., non-cationic polymeric materials and/or anionic polymeric materials. Collectively, anionic and neutral polymeric materials are referred to herein as non-cationic polymeric materials.

[0298] B. Lipids & Lipid-Like Materials

[0299] The terms “lipid” and “lipid-like material” are used herein to refer to molecules which comprise one or more hydrophobic moieties or groups and optionally also one or more hydrophilic moieties or groups. According to the disclosure, lipids and lipid-like materials may be cationic, anionic or neutral. Neutral lipids or lipid-like materials exist in an uncharged or neutral zwitterionic form at a selected pH.

[0300] The term “lipid” refers to a group of organic compounds that are characterized by being insoluble in water but soluble in many organic solvents. Generally, lipids may be divided into eight categories: fatty acids and their derivatives (including tri-, di-, monoglycerides, and phospholipids), glycerolipids, glycerophospholipids, sphingolipids, saccharolipids, polyketides, sterol lipids as well as sterol-containing metabolites such as cholesterol, and prenol lipids. Examples of fatty acids include, but are not limited to, fatty esters and fatty amides. Examples of glycerolipids include, but are not limited to, glycosylglycerols and glycerophospholipids (e.g., phosphatidylcholine, phosphatidylethanolamine, phosphatidylserine). Examples of sphingolipids include, but are not limited to, ceramides phosphosphingolipids (e.g., sphingomyelins, phosphocholine), and glycosphingolipids (e.g., cerebrosides, gangliosides). Examples of sterol lipids include, but are not limited to, cholesterol and its derivatives and tocopherol and its derivatives.

[0301] The term “lipid-like material,” “lipid-like compound,” or “lipid-like molecule” relates to substances that structurally and/or functionally relate to lipids but may not be considered as lipids in a strict sense. For example, the term includes compounds that are able to form amphiphilic layers as they are present in vesicles, multilamellar/unilamellar liposomes, or membranes in an aqueous environment and includes surfactants, or synthesized compounds with both hydrophilic and hydrophobic moieties. Generally speaking, the term refers to molecules, which comprise hydrophilic and hydrophobic moieties with different structural organization, which may or may not be similar to that of lipids.

[0302] In some aspects, the RNA solution and lipid preparation mixture or compositions thereof may comprise cationic lipids, neutral lipids, cholesterol, and/or polymer (e.g., polyethylene glycol) conjugated lipids which form lipid nanoparticles that encompass the RNA molecules. Therefore, in some aspects, the LNP may comprise a cationic lipid and one or more excipients, e.g., one or more neutral lipids, charged lipids, steroids or steroid analogs (e.g., cholesterol), polymer conjugated lipids (e.g. PEG-lipid), or combinations thereof. In some aspects, the LNPs encompass, or encapsulate, the nucleic acid molecules.

[0303] i. Cationic Lipids

[0304] Cationic or cationically ionizable lipids or lipid-like materials refer to a lipid or lipid-like material capable of being positively charged and able to electrostatically bind nucleic acid. As used herein, a “cationic lipid” or “cationic lipid-like material” refers to a lipid or lipid like material having a net positive charge. Cationic lipids or lipid-like materials bind negatively charged nucleic acid by electrostatic interaction. Generally, cationic lipids possess a lipophilic moiety, such as a sterol, an acyl chain, a diacyl or more acyl chains, and the head group of the lipid typically carries the positive charge. Exemplary cationic lipids include one or more amine group(s) which bear the positive charge. Cationic lipids may encapsulate negatively charged RNA.

[0305] In some aspects, cationic lipids are ionizable such that they may exist in a positively charged or neutral form depending on pH. The ionization of the cationic lipid affects the surface charge of the lipid nanoparticle under different pH conditions. Without wishing to be bound by theory, this ionizable behavior is thought to enhance efficacy through helping with endosomal escape and reducing toxicity as compared with particles that remain cationic at physiological pH. For purposes of the present disclosure, such “cationically ionizable” lipids or lipid-like materials are comprised by the term “cationic lipid” or “cationic lipid-like material” unless contradicted by the circumstances.

[0306] In some aspects, a cationic lipid may comprise from about 10 mol % to about 100 mol %, about 20 mol % to about 100 mol %, about 30 mol % to about 100 mol %, about 40 mol % to about 100 mol %, or about 50 mol % to about 100 mol % of the total lipid present in the particle. In some aspects, a cationic lipid may be at least, at most, exactly, or between any two of 10 mol %, 20 mol %, 30 mol %, 40 mol %, 50 mol %, 60 mol %, 70 mol %, 80 mol %, 90 mol %, or 100 mol %, or any range or value derivable therein, of the total lipid present in the particle.

[0307] Examples of cationic lipids include, but are not limited to: ((4-hydroxybutyl)azanediyl)bis(hexane-6,1-diyl)bis(2-hexyldecanoate); 1,2-dioleoyl-3-trimethylammonium propane (DOTAP); N,N-dimethyl-2,3-dioleyloxypropylamine (DODMA), 1,2-di-O-octadecenyl-3-trimethylammonium propane (DOTMA), 3-(N—(N′,N′-dimethylaminoethane)-carbamoyl)cholesterol (DC-Chol), dimethyldioctadecylammonium (DDAB); 1,2-dioleoyl-3-dimethylammonium-propane (DODAP); 1,2-diacyloxy-3-dimethylammonium propanes; 1,2-dialkyloxy-3-dimethylammonium propanes; dioctadecyldimethyl ammonium chloride (DODAC), 1,2-distearyloxy-N,N-dimethyl-3-aminopropane (DSDMA), 2,3-di(tetradecoxy)propyl-(2-hydroxyethyl)-dimethylazanium (DMRIE), 1,2-dimyristoyl-sn-glycero-3-ethylphosphocholine (DMEPC), 1,2-dimyristoyl-3-trimethylammonium propane (DMTAP), 1,2-dioleyloxypropyl-3-dimethyl-hydroxyethyl ammonium bromide (DORIE), and 2,3-dioleoyloxy-N-[2(spermine carboxamide)ethyl]-N,N-dimethyl-I-propanamium trifluoroacetate (DOSPA), 1,2-dilinoleyloxy-N,N-dimethylaminopropane (DLinDMA), 1,2-dilinolenyloxy-N,N-dimethylaminopropane (DLenDMA), dioctadecylamidoglycyl spermine (DOGS), 3-dimethylamino-2-(cholest-5-en-3-beta-oxybutan-4-oxy)-I-(cis,cis-9,12-oc-tadecadienoxy)propane (CLinDMA), 2-[5′-(cholest-5-en-3-beta-oxy)-3′-oxapentoxy)-3-dimethyl-I-(cis,cis-9′,12′-octadecadienoxy)propane (CpLinDMA), N,N-dimethyl-3,4-dioleyloxybenzylamine (DMOBA), 1,2-N,N′-dioleylcarbamyl-3-dimethylaminopropane (DOcarbDAP), 2,3-Dilinoleoyloxy-N,N-dimethylpropylamine (DLinDAP), 1,2-N,N′-Dilinoleylcarbamyl-3-dimethylaminopropane (DLincarbDAP), 1,2-Dilinoleoylcarbamyl-3-dimethylaminopropane (DLinCDAP), 2,2-dilinoleyl-4-dimethylaminomethyl-[1,3]-dioxolane (DLin-K-DMA), 2,2-dilinoleyl-4-dimethylaminoethyl-[1,3]-dioxolane (DLin-K-XTC2-DMA), 2,2-dilinoleyl-4-(2-dimethylaminoethyl)-[1,3]-dioxolane (DLin-KC2-DMA), heptatriaconta-6,9,28,31-tetraen-19-yl-4-(dimethylamino)butanoate (DLin-MC3-DM A), N-(2-Hydroxyethyl)-N,N-dimethyl-2,3-bis(tetradecyloxy)-1-propanaminium bromide (DMRIE), (±)-N-(3-aminopropyl)-N,N-dimethyl-2,3-bis(cis-9-tetradecenyloxy)-1-propanaminium bromide (GAP-DMORIE), (±)-N-(3-aminopropyl)-N,N-dimethyl-2,3-bis(dodecyloxy)-1-propanaminium bromide (GAP-DLRIE), (±)-N-(3-aminopropyl)-N,N-dimethyl-2,3-bis(tetradecyloxy)-I-propanaminium bromide (GAP-DMRIE), N-(2-Aminoethyl)-N,N-dimethyl-2,3-bis(tetradecyloxy)-1-propanaminium bromide (bAE-DMRIE), N-(4-carboxybenzyl)-N,N-dimethyl-2,3-bis(oleoyloxy)propan-1-aminium (DOBAQ), 2-({8-[(3b)-cholest-5-en-3-yloxy]octyl}oxy)-N,N-dimethyl-3-[(9Z,12Z)-octadeca-9,12-dien-1-yloxy]propan-1-amine (Octyl-CLinDMA), 1,2-dimyristoyl-3-dimethylammonium-propane (DMDAP), 1,2-dipalmitoyl-3-dimethylammonium-propane (DPDAP), N1-[2-((1S)-1-[(3-aminopropyl)amino]-4-[di(3-amino-propyl)amino]butylcarboxamido)ethyl]-3,4-di[oleyloxy]-benzamide (MVL5), 1,2-dioleoyl-sn-glycero-3-ethylphosphocholine (DOEPC), 2,3-bis(dodecyloxy)-N-(2-hydroxyethyl)-N,N-dimethylpropan-1-ammonium bromide (DLRIE), N-(2-aminoethyl)-N,N-dimethyl-2,3-bis(tetradecyloxy)propan-1-aminium bromide (DMORIE), di((Z)-non-2-en-I-yl) 8,8′-((((2(dimethylamino)ethyl)thio)carbonyl)azanediyl)dioctanoate (ATX), N,N-dimethyl-2,3-bis(dodecyloxy)propan-1-amine (DLDMA), N,N-dimethyl-2,3-bis(tetradecyloxy)propan-1-amine (DMDMA), Di((Z)-non-2-en-I-yl)-9-((4-(dimethylaminobutanoyl)oxy)heptadecanedioate (L319), N-Dodecyl-3-((2-dodecylcarbamoyl-ethyl)-{2-[(2-dodecylcarbamoyl-ethyl)-2-{(2-dodecylcarbamoyl-ethyl)-[2-(2-dodecylcarbamoyl-ethylamino)-ethyl]-amino}-ethylamino)propionamide (lipidoid 98N12-5), 1-[2-[bis(2-hydroxydodecyl)amino]ethyl-[2-[4-[2-[bis(2 hydroxydodecyl)amino]ethyl]piperazin-1-yl]ethyl]amino]dodecan-2-ol (lipidoid 02-200); or heptadecan-9-yl 8-((2-hydroxyethyl) (6-oxo-6-(undecyloxy)hexyl) amino) octanoate (SM-102).

[0308] In some aspects, the lipid nanoparticles comprise one or more cationic lipids. In one aspect, the lipid nanoparticles comprise (4-hydroxybutyl)azanediyl)bis(hexane-6,1-diyl)bis(2-hexyldecanoate) (ALC-0315), having the formula:

[chemical structure]

Cationic lipids are disclosed in, e.g., U.S. Pat. No. 10,166,298, the full disclosures of which are herein incorporated by reference in their entirety for all purposes. Representative cationic lipids include:

| No. | Structure |
|---|---|
| 1 | [chemical structure] |
| 2 | [chemical structure] |
| 3 | [chemical structure] |
| 4 | [chemical structure] |
| 5 | [chemical structure] |
| 6 | [chemical structure] |
| 7 | [chemical structure] |
| 8 | [chemical structure] |
| 9 | [chemical structure] |
| 10 | [chemical structure] |
| 11 | [chemical structure] |
| 12 | [chemical structure] |
| 13 | [chemical structure] |
| 14 | [chemical structure] |
| 15 | [chemical structure] |
| 16 | [chemical structure] |
| 17 | [chemical structure] |
| 18 | [chemical structure] |
| 19 | [chemical structure] |
| 20 | [chemical structure] |
| 21 | [chemical structure] |
| 22 | [chemical structure] |
| 23 | [chemical structure] |
| 24 | [chemical structure] |
| 25 | [chemical structure] |
| 26 | [chemical structure] |
| 27 | [chemical structure] |
| 28 | [chemical structure] |
| 29 | [chemical structure] |
| 30 | [chemical structure] |
| 31 | [chemical structure] |
| 32 | [chemical structure] |
| 33 | [chemical structure] |
| 34 | [chemical structure] |
| 35 | [chemical structure] |
| 36 | [chemical structure] |

[chemical structure]

[0309] In some aspects, the RNA-LNPs comprise a cationic lipid, a RNA molecule as described herein and one or more of neutral lipids, steroids, pegylated lipids, or combinations thereof. If more than one cationic lipid is incorporated within the LNP, such percentages apply to the combined cationic lipids. In one aspect, the cationic lipid is present in the LNP in an amount such as at least, at most, exactly, or between any two of about 40, 41, 42, 43, 44, 45, 46, 47, 48, 49, 50, 51, 52, 53, 54, 55, 56, 57, 58, 59 or 60 mole percent, respectively.

[0310] In some aspects of the disclosure the LNP comprises a combination or mixture of any the lipids described above.

[0311] ii. Polymer Conjugated Lipid

[0312] In some aspects, the LNPs comprise a polymer conjugated lipid. The term “polymer conjugated lipid” refers to a molecule comprising both a lipid portion and a polymer portion. An example of a polymer conjugated lipid is a pegylated lipid. The term “pegylated lipid” refers to a molecule comprising both a lipid portion and a polyethylene glycol portion. Pegylated lipids are known in the art and include 1-(monomethoxy-polyethyleneglycol)-2,3-dimyristoylglycerol (PEG-s-DMG), 2-[(polyethylene glycol)-2000]-N,N-ditetradecylacetamide, and the like.

[0313] In certain aspects, the LNP comprises an additional, stabilizing-lipid which is a polyethylene glycol-lipid (pegylated lipid). A polymer conjugated lipid (e.g. PEG-lipid) refers to a molecule comprising both a lipid portion and a polymer portion. An example of a polymer conjugated lipid is a PEG-lipid. A PEG-lipid refers to a molecule comprising both a lipid portion and a polyethylene glycol portion. PEG-lipids include, but are not limited to, PEG-modified phosphatidylethanolamine, PEG-modified phosphatidic acid, PEG-modified ceramides (e.g. PEG-CerC14 or PEG-CerC20), PEG-modified dialkylamines, PEG-modified diacylglycerols, PEG-modified dialkylglycerols. Representative polyethylene glycol-lipids include PEG-c-DOMG, PEG-c-DMA, and PEG-s-DMG. In one aspect, the polyethylene glycol-lipid is N-[(methoxy polyethylene glycol)2000)carbamyl]-1,2-dimyristyloxlpropyl-3-amine (PEG-c-DMA). In one aspect, the polyethylene glycol-lipid is PEG-2000-DMG. In one aspect, the polyethylene glycol-lipid is PEG-c-DOMG). In other aspects, the LNPs comprise a PEGylated diacylglycerol (PEG-DAG) such as 1-(monomethoxy-polyethyleneglycol)-2,3-dimyristoylglycerol (PEG-DMG), a PEGylated phosphatidylethanoloamine (PEG-PE), a PEG succinate diacylglycerol (PEG-S-DAG) such as 4-O-(2′,3′-di(tetradecanoyloxy)propyl-1-O-((o-methoxy(polyethoxy)ethyl)butanedioate (PEG-S-DMG), a PEGylated ceramide (PEG-cer), or a PEG dialkoxypropylcarbamate such as co-methoxy(polyethoxy)ethyl-N-(2,3di(tetradecanoxy)propyl)carbamate or 2,3-di(tetradecanoxy)propyl-N-(u>-methoxy(polyethoxy)ethyl)carbamate. PEG-lipids are disclosed in, e.g., U.S. Pat. No. 9,737,619, the full disclosures of which are herein incorporated by reference in their entirety for all purposes.

[0314] In some aspects, the lipid nanoparticles comprise a polymer conjugated lipid. In one aspect, the lipid nanoparticle comprises 2-[(polyethylene glycol)-2000]-N,N-ditetradecylacetamide (ALC-0159), having the formula:

[chemical structure]

[0315] In various aspects, the molar ratio of the cationic lipid to the pegylated lipid ranges from about 100:1 to about 20:1, e.g., from about 20:1, 25:1, 30:1, 35:1, 40:1, 45:1, 50:1, 55:1, 60:1, 65:1, 70:1, 75:1, 80:1, 85:1, 90:1, 95:1, or 100:1, or any range or value derivable therein.

[0316] In certain aspects, the PEG-lipid is present in the LNP in an amount from about 1 to about 10 mole percent (mol %) (e.g., at least, at most, exactly, or between any two of 1, 2, 3, 4, 5, 6, 7, 8, 9, or 10 mol %), relative to the total lipid content of the nanoparticle.

[0317] iii. Additional Lipids

[0318] In certain aspects, the LNP comprises one or more additional lipids or lipid-like materials that stabilize the formation of particles during their formation. Suitable stabilizing or structural lipids include non-cationic lipids, e.g., neutral lipids and anionic lipids. Without being bound by any theory, optimizing the formulation of LNPs by addition of other hydrophobic moieties, such as cholesterol and lipids, in addition to an ionizable/cationic lipid or lipid-like material may enhance particle stability and efficacy of nucleic acid delivery.

[0319] As used herein, an “anionic lipid” refers to any lipid that is negatively charged at a selected pH. The term “neutral lipid” refers to any one of a number of lipid species that exist in either an uncharged or neutral zwitterionic form at physiological pH. In some aspects, additional lipids comprise one of the following neutral lipid components: (1) a phospholipid, (2) cholesterol or a derivative thereof; or (3) a mixture of a phospholipid and cholesterol or a derivative thereof.

[0320] Representative neutral lipids include phosphatidylcholines, phosphatidylethanolamines, phosphatidylglycerols, phosphatidic acids, phosphatidylserines, ceramides, sphingomyelins, dihydro-sphingomyelins, cephalins, and cerebrosides. Exemplary phospholipids include, for example, phosphatidylcholines, e.g., diacylphosphatidylcholines, such as distearoylphosphatidylcholine (DSPC), dioleoylphosphatidylcholine (DOPC), dimyristoylphosphatidylcholine (DMPC), dipentadecanoylphosphatidylcholine, dilauroylphosphatidylcholine, dipalmitoylphosphatidylcholine (DPPC), dioleoylphosphatidylglycerol (DOPG), dipalmitoylphosphatidylglycerol (DPPG), diarachidoylphosphatidylcholine (DAPC), dibehenoylphosphatidylcholine (DBPC), ditricosanoylphosphatidylcholine (DTPC), dilignoceroylphatidylcholine (DLPC), palmitoyloleoyl-phosphatidylcholine (POPC), 1,2-di-O-octadecenyl-sn-glycero-3-phosphocholine (18:0 Diether PC), I-oleoyl-2-cholesterylhemisuccinoyl-sn-glycero-3-phosphocholine (OChemsPC), and 1-hexadecyl-sn-glycero-3-phosphocholine (C16 Lyso PC), and phosphatidylethanolamines, e.g., diacylphosphatidylethanolamines, such as dioleoyl-phosphatidylethanolamine (DOPE), palmitoyloleoylphosphatidylcholine (POPC), palmitoyloleoyl-phosphatidylethanolamine (POPE) and dioleoyl-phosphatidylethanolamine 4-(N-maleimidomethyl)-cyclohexane-Icarboxylate (DOPE-mal), dipalmitoyl phosphatidyl ethanolamine (DPPE), dimyristoylphosphoethanolamine (DMPE), dilauroyl-phosphatidylethanolamine (DLPE), distearoyl-phosphatidylethanolamine (DSPE), iphytanoyl-phosphatidylethanolamine (DpyPE), 16-O-monomethyl PE, 16-O-dimethyl PE, 18-1-trans PE, 1-stearioyl-2-oleoylphosphatidyethanol amine (SOPE), and 1,2-dielaidoyl-sn-glycero-3-phophoethanolamine (transDOPE). In one aspect, the neutral lipid is 1,2-distearoyl-sn-glycero-3phosphocholine (DSPC), having the formula:

[chemical structure]

[0321] In some aspects, the LNPs comprise a neutral lipid, and the neutral lipid comprises one or more of DSPC, DPPC, DMPC, DOPC, POPC, DOPE, or SM.

[0322] In various aspects, the LNPs further comprise a steroid or steroid analogue. A “steroid” is a compound comprising the following carbon skeleton:

[chemical structure]

[0323] In certain aspects, the steroid or steroid analogue is cholesterol. Examples of cholesterol derivatives include, but are not limited to, cholestanol, cholestanone, cholestenone, coprostanol, cholesteryl-2′-hydroxyethyl ether, cholesteryl-4′-hydroxybutyl ether, tocopherol and derivatives thereof, and mixtures thereof. In one aspect, the cholesterol has the formula:

[chemical structure]

[0324] Without being bound by any theory, the amount of the at least one cationic lipid compared to the amount of the at least one additional lipid may affect important nucleic acid particle characteristics, such as charge, particle size, stability, tissue selectivity, and bioactivity of the nucleic acid. Accordingly, in some aspects, the molar ratio of the cationic lipid to the neutral lipid ranges from about 2:1 to about 8:1, or from about 10:0 to about 1:9, about 4:1 to about 1:2, or about 3:1 to about 1:1.

[0325] In some aspects, the non-cationic lipid, e.g., neutral lipid (e.g., one or more phospholipids and/or cholesterol), may comprise from about 0 mol % to about 90 mol %, from about 0 mol % to about 80 mol %, from about 0 mol % to about 70 mol %, from about 0 mol % to about 60 mol %, or from about 0 mol % to about 50 mol %, of the total lipid present in the particle. In some aspects, the non-cationic lipid, e.g., neutral lipid (e.g., one or more phospholipids and/or cholesterol), may be at least, at most, exactly, or between any two of 0 mol %, 10 mol %, 20 mol %, 30 mol %, 40 mol %, 50 mol %, 60 mol %, 70 mol %, 80 mol %, or 90 mol % of the total lipid present in the particle.

### VI. Characterization and Analysis of RNA Molecule

[0326] The RNA molecule described herein may be analyzed and characterized using various methods. Analysis may be performed before or after capping. Alternatively, analysis may be performed before or after poly-A capture-based affinity purification. In another aspect, analysis may be performed before or after additional purification steps, e.g., anion exchange chromatography and the like. For example, RNA template quality may be determined using Bioanalyzer chip based electrophoresis system. In other aspects, RNA template purity is analyzed using analytical reverse phase HPLC respectively. Capping efficiency may be analyzed using, e.g., total nuclease digestion followed by MS/MS quantitation of the dinucleotide cap species vs. uncapped GTP species. In vitro efficacy may be analyzed by, e.g., transfecting RNA molecule into a human cell line. Protein expression of the polypeptide of interest may be quantified using methods such as ELISA or flow cytometry. Immunogenicity may be analyzed by, e.g., transfecting RNA molecules into cell lines that indicate innate immune stimulation, e.g., PBMCs. Cytokine induction may be analyzed using, e.g., methods such as ELISA to quantify a cytokine, e.g., Interferon-α. Biodistribution may be analyzed, e.g. by bioluminescence measurements.

[0327] In some aspects, an RNA polynucleotide disclosed herein is characterized in that, when assessed in an organism administered a composition or medical preparation comprising an RNA polynucleotide, elevated expression of a gene of interest (e.g., an antigen); increased duration of expression (e.g., prolonged expression) of a gene of interest (e.g., an antigen); elevated expression and increased duration of expression (e.g., prolonged expression) of a gene of interest (e.g., an antigen); decreased interaction with IFIT1 of an RNA polynucleotide; increased translation of an RNA polynucleotide; is observed relative to an appropriate reference.

[0328] In some aspects, a reference comprises an organism administered an otherwise similar RNA polynucleotide without a m7(3′OMeG)(5′)ppp(5′)(2′OMeAi)pG2 cap. In some aspects, a reference comprises an organism administered an otherwise similar RNA polynucleotide without a cap proximal sequence disclosed herein. In some aspects, a reference comprises an organism administered an otherwise similar RNA polynucleotide with a self-hybridizing sequence.

[0329] In some aspects, elevated expression is determined at least 24 hours, at least 48 hours at least 72 hours, at least 96 hours, or at least 120 hours after administration of a composition or medical preparation comprising an RNA polynucleotide. In some aspects, elevated expression is determined at least 24 hours after administration of a composition or medical preparation comprising an RNA polynucleotide. In some aspects, elevated expression is determined at least 48 hours after administration of a composition or medical preparation comprising an RNA polynucleotide. In some aspects, elevated expression is determined at least 72 hours after administration of a composition or medical preparation comprising an RNA polynucleotide. In some aspects, elevated expression is determined at least 96 hours after administration of a composition or medical preparation comprising an RNA polynucleotide. In some aspects, elevated expression is determined at least 120 hours after administration of a composition or medical preparation comprising an RNA polynucleotide.

[0330] In some aspects, elevated expression is determined at about 24-120 hours after administration of a composition or medical preparation comprising an RNA polynucleotide. In some aspects, elevated expression is determined at about 24-110 hours, about 24-100 hours, about 24-90 hours, about 24-80 hours, about 24-70 hours, about 24-60 hours, about 24-50 hours, about 24-40 hours, about 24-30 hours, about 30-120 hours, about 40-120 hours, about 50-120 hours, about 60-120 hours, about 70-120 hours, about 80-120 hours, about 90-120 hours, about 100-120 hours, or about 110-120 hours after administration of a composition or medical preparation comprising an RNA polynucleotide.

[0331] In some aspects, elevated expression of a gene of interest (e.g., an antigen) is at least 2-fold to at least 10-fold. In some aspects, elevated expression of a gene of interest (e.g., an antigen) is at least 2-fold. In some aspects, elevated expression of a gene of interest (e.g., an antigen) is at least 3-fold. In some aspects, elevated expression of a gene of interest (e.g., an antigen) is at least 4-fold. In some aspects, elevated expression of a gene of interest (e.g., an antigen) is at least 6-fold. In some aspects, elevated expression of a gene of interest (e.g., an antigen) is at least 8-fold. In some aspects, elevated expression of a gene of interest (e.g., an antigen) is at least 10-fold.

[0332] In some aspects, elevated expression of a gene of interest (e.g., an antigen) is about 2-fold to about 50-fold. In some aspects, elevated expression of a gene of interest (e.g., an antigen) is about 2-fold to about 45-fold, about 2-fold to about 40-fold, about 2-fold to about 30-fold, about 2-fold to about 25-fold, about 2-fold to about 20-fold, about 2-fold to about 15-fold, about 2-fold to about 10-fold, about 2-fold to about 8-fold, about 2-fold to about 5-fold, about 5-fold to about 50-fold, about 10-fold to about 50-fold, about 15-fold to about 50-fold, about 20-fold to about 50-fold, about 25-fold to about 50-fold, about 30-fold to about 50-fold, about 40-fold to about 50-fold, or about 45-fold to about 50-fold. In some aspects, elevated expression of a gene of interest (e.g., an antigen) is at least, at most, exactly, or between any two of 2-fold, 3-fold, 4-fold, 5-fold, 6-fold, 7-fold, 8-fold, 9-fold, 10-fold, 11-fold, 12-fold, 13-fold, 14-fold, 15-fold, 16-fold, 17-fold, 18-fold, 19-fold, 20-fold, 21-fold, 22-fold, 23-fold, 24-fold, 25-fold, 26-fold, 27-fold, 28-fold, 29-fold, 30-fold, 31-fold, 32-fold, 33-fold, 34-fold, 35-fold, 36-fold, 37-fold, 38-fold, 39-fold, 40-fold, 41-fold, 42-fold, 43-fold, 44-fold, 45-fold, 46-fold, 47-fold, 48-fold, 49-fold, or 50-fold, or any range or value derivable therein.

[0333] In some aspects, elevated expression (e.g., increased duration of expression) of a gene of interest (e.g., an antigen) persists for at least, at most, exactly, or between any two of 24 hours, 48 hours, 72 hours, 96 hours, or 120 hours after administration of a composition or a medical preparation comprising an RNA polynucleotide. In some aspects, elevated expression of a gene of interest (e.g., an antigen) persists for at least 24 hours after administration. In some aspects, elevated expression of a gene of interest (e.g., an antigen) persists for at least 48 hours after administration. In some aspects, elevated expression of a gene of interest (e.g., an antigen) persists for at least 72 hours after administration. In some aspects, elevated expression of a gene of interest (e.g., an antigen) persists for at least 96 hours after administration. In some aspects, elevated expression of a gene of interest (e.g., an antigen) persists for at least 120 hours after administration of a composition or medical preparation comprising an RNA polynucleotide.

[0334] In some aspects, elevated expression of a gene of interest (e.g., an antigen) persists for about 24-120 hours after administration of a composition or medical preparation comprising an RNA polynucleotide. In some aspects, elevated expression persists for about 24-110 hours, about 24-100 hours, about 24-90 hours, about 24-80 hours, about 24-70 hours, about 24-60 hours, about 24-50 hours, about 24-40 hours, about 24-30 hours, about 30-120 hours, about 40-120 hours, about 50-120 hours, about 60-120 hours, about 70-120 hours, about 80-120 hours, about 90-120 hours, about 100-120 hours, or about 110-120 hours after administration of a composition or medical preparation comprising an RNA polynucleotide. In some aspects, elevated expression of a gene of interest (e.g., an antigen) persists for at least, at most, exactly, or between any two of 24 hours, 36 hours, 48 hours, 60 hours, 72 hours, 84 hours, 96 hours, 108 hours, or 120 hours, or any range or value derivable therein.

### VII. Immune Response and Assays

[0335] As discussed herein, the disclosure concerns evoking or inducing an immune response in a subject against a VZV protein, e.g., a wild type or variant VZV glycoprotein. In one aspect, the immune response may protect against or treat a subject having, suspected of having, or at risk of developing an infection or related disease, particularly those related to VZV. One use of the immunogenic compositions of the disclosure is to prevent VZV infections by inoculating or vaccination of a subject.

[0336] A. Immunoassays

[0337] The present disclosure includes the implementation of serological assays to evaluate whether and to what extent an immune response is induced or evoked by compositions of the disclosure. There are many types of immunoassays that may be implemented. Immunoassays encompassed by the present disclosure include, but are not limited to, those described in U.S. Pat. No. 4,367,110 (double monoclonal antibody sandwich assay) and U.S. Pat. No. 4,452,901 (western blot). Other assays include immunoprecipitation of labeled ligands and immunocytochemistry, both in vitro and in vivo.

[0338] Immunoassays generally are binding assays. In some aspects, the immunoassays are the various types of enzyme linked immunosorbent assays (ELISAs) and radioimmunoassays (RIA) known in the art. Immunohistochemical detection using tissue sections is also particularly useful. In one example, antibodies or antigens are immobilized on a selected surface, such as a well in a polystyrene microtiter plate, dipstick, or column support. Then, a test composition suspected of containing the desired antigen or antibody, such as a clinical sample, is added to the wells. After binding and washing to remove non-specifically bound immune complexes, the bound antigen or antibody may be detected. Detection is generally achieved by the addition of another antibody, specific for the desired antigen or antibody, that is linked to a detectable label. This type of ELISA is known as a “sandwich ELISA.” Detection also may be achieved by the addition of a second antibody specific for the desired antigen, followed by the addition of a third antibody that has binding affinity for the second antibody, with the third antibody being linked to a detectable label.

[0339] Competition ELISAs are also possible implementations in which test samples compete for binding with known amounts of labeled antigens or antibodies. The amount of reactive species in the unknown sample is determined by mixing the sample with the known labeled species before or during incubation with coated wells. The presence of reactive species in the sample acts to reduce the amount of labeled species available for binding to the well and thus reduces the ultimate signal. Irrespective of the format employed, ELISAs have certain features in common, such as coating, incubating or binding, washing to remove non-specifically bound species, and detecting the bound immune complexes.

[0340] Antigen or antibodies may also be linked to a solid support, such as in the form of plate, beads, dipstick, membrane, or column matrix, and the sample to be analyzed is applied to the immobilized antigen or antibody. In coating a plate with either antigen or antibody, one will generally incubate the wells of the plate with a solution of the antigen or antibody, either overnight or for a specified period. The wells of the plate will then be washed to remove incompletely-adsorbed material. Any remaining available surfaces of the wells are then “coated” with a nonspecific protein that is antigenically neutral with regard to the test antisera. These include bovine serum albumin (BSA), casein, and solutions of milk powder. The coating allows for blocking of nonspecific adsorption sites on the immobilizing surface and thus reduces the background caused by nonspecific binding of antisera onto the surface.

[0341] B. Diagnosis of VZV Infection

[0342] The present disclosure contemplates the use of VZV polypeptides, proteins, and/or peptides in a variety of ways, including the detection of the presence of VZV to diagnose an infection. In accordance with the disclosure, a method of detecting the presence of infections involves the steps of obtaining a sample suspected of being infected by one or more VZV strains, such as a sample taken from an individual, for example, from one's blood, saliva, tissues, bone, muscle, cartilage, or skin. Following isolation of the sample, diagnostic assays utilizing the polypeptides, proteins, and/or peptides of the present disclosure may be carried out to detect the presence of VZV, and such assay techniques for determining such presence in a sample are well known to those skilled in the art and include methods such as radioimmunoassay, western blot analysis and ELISA assays.

[0343] In general, in accordance with the disclosure, a method of diagnosing an infection is contemplated wherein a sample suspected of being infected with VZV has added to it the polypeptide, protein, or peptide, in accordance with the present disclosure, and VZV is indicated by antibody binding to the polypeptides, proteins, and/or peptides, or polypeptides, proteins, and/or peptides binding to the antibodies in the sample.

[0344] Accordingly, RNA molecules encoding VZV polypeptides, proteins, and/or peptides in accordance with the disclosure may be used for to treat, prevent, or reduce the severity of illness from infection due to VZV infection (e.g., active or passive immunization) or for use as research tools.

[0345] Any of the above described polypeptides, proteins, and/or peptides may be labeled directly with a detectable label for identification and quantification of VZV. Labels for use in immunoassays are generally known to those skilled in the art and include enzymes, radioisotopes, and fluorescent, luminescent and chromogenic substances, including colored particles such as colloidal gold or latex beads. Suitable immunoassays include enzyme-linked immunosorbent assays (ELISA).

[0346] C. Protective Immunity

[0347] In some aspects of the disclosure, RNA molecules encoding VZV polypeptides, RNA-LNPs and compositions thereof, confer protective immunity to a subject. Protective immunity refers to a body's ability to mount a specific immune response that protects the subject from developing a particular disease or condition that involves the agent against which there is an immune response. An immunogenically effective amount is capable of conferring protective immunity to the subject.

[0348] As used herein the phrase “immune response” or its equivalent “immunological response” refers to the development of a humoral (antibody mediated), cellular (mediated by antigen-specific T cells or their secretion products) or both humoral and cellular response directed against an antigen. Such a response may be an active response or a passive response. A cellular immune response is elicited by the presentation of polypeptide epitopes in association with Class I or Class II MHC molecules, to activate antigen-specific CD4 (+) T helper cells and/or CD8 (+) cytotoxic T cells. The response may also involve activation of monocytes, macrophages, NK cells, basophils, dendritic cells, astrocytes, microglia cells, eosinophils or other components of innate immunity. As used herein “active immunity” refers to any immunity conferred upon a subject from the production of antibodies in response to the presence of an of an antigen, e.g. a VZV polypeptide encoded by a RNA molecule of the present disclosure.

[0349] As used herein “passive immunity” includes, but is not limited to, administration of activated immune effectors including cellular mediators or protein mediators (e.g., monoclonal and/or polyclonal antibodies) of an immune response. A monoclonal or polyclonal antibody composition may be used in passive immunization to treat, prevent, or reduce the severity of illness caused by infection by organisms that carry the antigen recognized by the antibody. An antibody composition may include antibodies that bind to a variety of antigens that may in turn be associated with various organisms. The antibody component may be a polyclonal antiserum. In certain aspects the antibody or antibodies are affinity purified from an animal or second subject that has been challenged with an antigen(s). Alternatively, an antibody mixture may be used, which is a mixture of monoclonal and/or polyclonal antibodies to antigens present in the same, related, or different microbes or organisms, such as viruses, including but not limited to VZV.

[0350] Passive immunity may be imparted to a patient or subject by administering to the patient immunoglobulins (Ig) and/or other immune factors obtained from a donor or other non-patient source having a known immunoreactivity. In other aspects, an immunogenic composition of the present disclosure may be administered to a subject who then acts as a source or donor for globulin, produced in response to challenge with the immunogenic composition (“hyperimmune globulin”), that contains antibodies directed against a VZV or other organism. A subject thus treated would donate plasma from which hyperimmune globulin would then be obtained, via conventional plasma-fractionation methodology, and administered to another subject in order to impart resistance against or to treat VZV infection.

[0351] For purposes of this specification and the accompanying claims the terms “epitope” and “antigenic determinant” are used interchangeably to refer to a site on an antigen to which B and/or T cells respond or recognize. B-cell epitopes may be formed both from contiguous amino acids or noncontiguous amino acids juxtaposed by tertiary folding of a protein. Epitopes formed from contiguous amino acids are typically retained on exposure to denaturing solvents whereas epitopes formed by tertiary folding are typically lost on treatment with denaturing solvents. An epitope typically includes at least 3, and more usually, at least 5 or 8-10 amino acids in a unique spatial conformation. Methods of determining spatial conformation of epitopes include, for example, x-ray crystallography and 2-dimensional nuclear magnetic resonance. See, e.g., Epitope Mapping Protocols (1996). Antibodies that recognize the same epitope may be identified in a simple immunoassay showing the ability of one antibody to block the binding of another antibody to a target antigen. T-cells recognize continuous epitopes of about nine amino acids for CD8 cells or about 13-15 amino acids for CD4 cells. T cells that recognize the epitope may be identified by in vitro assays that measure antigen-dependent proliferation, as determined by ³H-thymidine incorporation by primed T cells in response to an epitope (Burke et al., 1994), by antigen-dependent killing (cytotoxic T lymphocyte assay, Tigges et al., 1996) or by cytokine secretion.

[0352] The presence of a cell-mediated immunological response may be determined by proliferation assays (CD4 (+) T cells) or CTL (cytotoxic T lymphocyte) assays. The relative contributions of humoral and cellular responses to the protective or therapeutic effect of an immunogenic composition may be distinguished by separately isolating IgG and T-cells from an immunized syngeneic animal and measuring protective or therapeutic effect in a second subject.

[0353] As used herein, the terms “antibody” or “immunoglobulin” are used interchangeably and refer to any of several classes of structurally related proteins that function as part of the immune response of an animal or recipient, which proteins include IgG, IgD, IgE, IgA, IgM and related proteins. Under normal physiological conditions antibodies are found in plasma and other body fluids and in the membrane of certain cells and are produced by lymphocytes of the type denoted B cells or their functional equivalent.

[0354] As used herein the terms “immunogenic agent” or “immunogen” or “antigen” are used interchangeably to describe a molecule capable of inducing an immunological response against itself on administration to a recipient, either alone, in conjunction with an adjuvant, or presented on a display vehicle.

### VIII. Compositions

[0355] In some aspects, an RNA molecules and/or RNA-LNPs disclosed herein may be administered in a pharmaceutical composition or a medicament and may be administered in the form of any suitable pharmaceutical composition. In some aspects, a pharmaceutical composition is for therapeutic or prophylactic treatments. In one aspect, the disclosure relates to a composition for administration to a host. In some aspects, the host is a human. In other aspects, the host is a non-human.

[0356] In some aspects, an RNA molecules and/or RNA-LNPs disclosed herein may be administered in a pharmaceutical composition which may be formulated into preparations in solid, semi-solid, liquid, lyophilized, frozen, or gaseous forms. In some aspects, an RNA molecule and/or RNA-LNPs disclosed herein may be administered in a pharmaceutical composition which may comprise a pharmaceutically acceptable carrier and may optionally comprise one or more adjuvants, stabilizers, salts, buffers, preservatives, and optionally other therapeutic agents. In some aspects, a pharmaceutical composition disclosed herein comprises one or more pharmaceutically acceptable carriers, diluents and/or excipients. In some aspects, pharmaceutical compositions do not include an adjuvant (e.g., they are adjuvant free).

[0357] Suitable preservatives for use in a pharmaceutical compositions of the present disclosure include, without limitation, benzalkonium chloride, chlorobutanol, paraben and thimerosal. The term “excipient” as used herein refers to a substance which may be present in a pharmaceutical composition of the present disclosure but is not an active ingredient. Examples of excipients, include without limitation, carriers, binders, diluents, lubricants, thickeners, surface active agents, preservatives, stabilizers, emulsifiers, buffers, flavoring agents, or colorants.

[0358] The term “diluent” relates a diluting and/or thinning agent. Moreover, the term “diluent” includes any one or more of fluid, liquid or solid suspension and/or mixing media. Examples of suitable diluents include ethanol, glycerol saline and water.

[0359] The term “carrier” refers to a component which may be natural, synthetic, organic, inorganic in which the active component is combined in order to facilitate, enhance or enable administration of the pharmaceutical composition. A carrier as used herein may be one or more compatible solid or liquid fillers, diluents or encapsulating substances, which are suitable for administration to subject. Suitable carrier include, without limitation, sterile water, Ringer, Ringer lactate, sterile sodium chloride solution, isotonic saline, polyalkylene glycols, hydrogenated naphthalenes and, in particular, biocompatible lactide polymers, lactide/glycolide copolymers or polyoxyethylene/polyoxy-propylene copolymers. In some aspects, the pharmaceutical composition of the present disclosure includes sodium chloride.

[0360] Pharmaceutically acceptable carriers, excipients or diluents for therapeutic use are well known in the pharmaceutical art, and are described, for example, in Remington's Pharmaceutical Sciences, Mack Publishing Co. (A. R Gennaro edit. 1985).

[0361] Pharmaceutical carriers, excipients or diluents may be selected with regard to the intended route of administration and standard pharmaceutical practice.

[0362] In some aspects, the composition comprises an RNA molecule comprising an open reading frame encoding an immunogenic polypeptide. In some aspects, the immunogenic polypeptide comprises a VZV antigen. In some aspects, the VZV antigen is a VZV polypeptide. In some aspects, the VZV polypeptide is a VZV glycoprotein (e.g. gK, gN, gC, gB, gH, gM, gL gI, and gE) or a fragment or a variant thereof. In some aspects, the RNA molecule encodes a VZV gK polypeptide, the RNA molecule encodes a VZV gN polypeptide, the RNA molecule encodes a VZV gC polypeptide, the RNA molecule encodes a VZV gB polypeptide, the RNA molecule encodes a VZV gH polypeptide, the RNA molecule encodes a VZV gM polypeptide, the RNA molecule encodes a VZV gL polypeptide, the RNA molecule encodes a VZV gI polypeptide, and/or the RNA molecule encodes a VZV gE polypeptide. In one aspect, the RNA molecule encodes a VZV gE polypeptide. In some aspects, the VZV polypeptide comprises two or more (e.g., 2, 3, 4, 5, 6, 7, 8, 9, or more) VZV polypeptides.

[0363] In some aspects, the composition comprises an RNA molecule comprising an open reading frame encoding a full-length VZV polypeptide. In some aspects, the encoded immunogenic polypeptide is a truncated VZV polypeptide. In some aspects, the encoded immunogenic polypeptide is a variant of a VZV polypeptide. In some aspects, the encoded immunogenic polypeptide is a fragment of a VZV polypeptide.

[0364] A. Immunogenic Compositions Including LNPS

[0365] In some aspects, a pharmaceutical composition comprises an RNA molecule (e.g., polynucleotide) disclosed herein formulated with a lipid-based delivery system. Thus, some aspects, the composition includes a lipid-based delivery system (e.g., LNPs) (e.g., a lipid-based vaccine), which delivers a nucleic acid molecule to the interior of a cell, where it may then replicate, inhibit protein expression of interest, and/or express the encoded polypeptide of interest. The delivery system may have adjuvant effects which enhance the immunogenicity of an encoded antigen. In some aspects, the composition comprises at least one RNA molecule encoding a VZV polypeptide complexed with, encapsulated in, and/or formulated with one or more lipids, and forming lipid nanoparticles (LNPs), liposomes, lipoplexes and/or nanoliposomes. In some aspects, the composition comprises a lipid nanoparticle. Thus, in certain aspects, the present disclosure concerns compositions comprising one or more lipids associated with a nucleic acid or a polypeptide/peptide (e.g., VZV RNA-LNPs).

[0366] The immunogenic composition including a lipid-based delivery system may further include one or more salts and/or one or more pharmaceutically acceptable surfactants, preservatives, carriers, diluents, and/or excipients, in some cases. In some aspects, the immunogenic composition including a lipid-based delivery system further include a pharmaceutically acceptable vehicle. In some aspects, each of a buffer, stabilizing agent, and optionally a salt, may be included in the immunogenic composition including a lipid-based delivery system. In other aspects, any one or more of a buffer, stabilizing agent, salt, surfactant, preservative, and excipient may be excluded from the immunogenic composition including a lipid-based delivery system.

[0367] In a further aspect, the immunogenic composition including a lipid-based delivery system further comprises a stabilizing agent. In some aspects, the stabilizing agent comprises sucrose, mannose, sorbitol, raffinose, trehalose, mannitol, inositol, sodium chloride, arginine, lactose, hydroxyethyl starch, dextran, polyvinylpyrolidone, glycine, or a combination thereof. In some aspects, the stabilizing agent is a disaccharide, or sugar. In one aspect, the stabilizing agent is sucrose. In another aspect, the stabilizing agent is trehalose. In a further aspect, the stabilizing agent is a combination of sucrose and trehalose. In some aspects, the total concentration of the stabilizing agent(s) in the composition is about 5% to about 10% w/v. For example, the total concentration of the stabilizing agent may be equal to at least, at most, exactly, or between any two of 1%, 2%, 3%, 4%, 5%, 6%, 7%, 8%, 9%, 10%, 11%, 12%, 13%, 14%, 15%, 16%, 17%, 18%, 19%, or 20% w/v or any range or value derivable therein. In some aspects, the stabilizing agent concentration includes, but is not limited to, a concentration of about 10 mg/mL to about 400 mg/mL, about 100 mg/mL to about 200 mg/mL, about 100 mg/mL to about 150 mg/mL, about 100 mg/mL to about 140 mg/mL, about 100 mg/mL to about 130 mg/mL, about 100 mg/mL to about 120 mg/mL, about 100 mg/mL to about 110 mg/mL, or about 100 mg/mL to about 105 mg/mL. In some aspects, the concentration of the stabilizing agent is equal to at least, at most, exactly, or between any two of 10 mg/mL, 20 mg/mL, 50 mg/mL, 100 mg/mL, 101 mg/mL, 102 mg/mL, 103 mg/mL, 104 mg/mL, 105 mg/mL, 106 mg/mL, 107 mg/mL, 108 mg/mL, 109 mg/mL, 110 mg/mL, 150 mg/mL, 200 mg/mL, 300 mg/mL, 400 mg/mL, or more.

[0368] In a further aspect, the mass amount of the stabilizing agent and the mass amount of the RNA are in a specific ratio. In one aspect, the ratio of the mass amount of the stabilizing agent and the RNA is no greater than 5000. In another aspect, the ratio of the mass amount of the stabilizing agent and the RNA is no greater than 2000. In another aspect, the ratio of the mass amount of the stabilizing agent and the RNA is no greater than 1000. In another aspect, the ratio of the mass amount of the stabilizing agent and the RNA is no greater than 500. In another aspect, the ratio of the mass amount of the stabilizing agent and the RNA is no greater than 100. In another aspect, the ratio of the mass amount of the stabilizing agent and the pharmaceutical substance is no greater than 50. In another aspect, the ratio of the mass amount of the stabilizing agent and the RNA is no greater than 10. In another aspect, the ratio of the mass amount of the stabilizing agent and the RNA is no greater than 1. In another aspect, the ratio of the mass amount of the stabilizing agent and the RNA is no greater than 0.5. In another aspect, the ratio of the mass amount of the stabilizing agent and the RNA is no greater than 0.1. In another aspect, the stabilizing agent and RNA comprise a mass ratio of about 200-2000 of the stabilizing agent:1 of the RNA.

[0369] In some aspects, the immunogenic composition including a lipid-based delivery system further comprises a buffer. Examples of buffering agents include, but are not limited to, citrate buffer solutions, acetate buffer solutions, phosphate buffer solutions, ammonium chloride, calcium carbonate, calcium chloride, calcium citrate, calcium glubionate, calcium gluceptate, calcium gluconate, d-gluconic acid, calcium glycerophosphate, calcium lactate, calcium lactobionate, propanoic acid, calcium levulinate, pentanoic acid, dibasic calcium phosphate, phosphoric acid, tribasic calcium phosphate, calcium hydroxide phosphate, potassium acetate, potassium chloride, potassium gluconate, potassium mixtures, dibasic potassium phosphate, monobasic potassium phosphate, potassium phosphate mixtures, sodium acetate, sodium bicarbonate, sodium chloride, sodium citrate, sodium lactate, dibasic sodium phosphate, monobasic sodium phosphate, sodium phosphate mixtures, tromethamine, Tris hydrochloride (HCl), amino-sulfonate buffers (e.g., HEPES), magnesium hydroxide, aluminum hydroxide, alginic acid, pyrogen-free water, isotonic saline, Ringer's solution, ethyl alcohol, and/or combinations thereof. In some aspects, the buffer is a HEPES buffer, a Tris buffer, or a PBS buffer. In one aspect, the buffer is Tris buffer. In another aspect, the buffer is a HEPES buffer. In a further aspect, the buffer is a PBS buffer. For example, the buffer concentration may be equal to at least, at most, exactly, or between any two of 1 mM, 2 mM, 3 mM, 4 mM, 5 mM, 6 mM, 7 mM, 8 mM, 9 mM, 10 mM, 11 mM, 12 mM, 13 mM, 14 mM, 15 mM, 16 mM, 17 mM, 18 mM, 19 mM, or 20 mM, or any range or value derivable therein. The buffer may be at a neutral pH, pH 6.5 to 8.5, pH 7.0 to pH 8.0, or pH 7.2 to pH 7.6. For example, the buffer may be at least, at most, exactly, or between any two of pH 6.5, 6.6, 6.7, 6.8, 6.9, 7, 7.1, 7.2, 7.3, 7.4, 7.5, 7.6, 7.7, 7.8, 7.9, 8, 8.1, 8.2, 8.3, 8.4, or 8.5, or any range or value derivable therein. In specific aspects, the buffer is at pH 7.4.

[0370] In some aspects, the immunogenic composition including a lipid-based delivery system may further comprise a salt. Examples of salts include but not limited to sodium salts and/or potassium salts. In one aspect, the salt is a sodium salt. In a specific aspect, the sodium salt is sodium chloride. In one aspect, the salt is a potassium salt. In some aspects, the potassium salt comprises potassium chloride. The concentration of the salts in the composition may be about 70 mM to about 140 mM. For example, the salt concentration may be equal to at least, at most, exactly, or between any two of 50 mM, 60 mM, 70 mM, 80 mM, 90 mM, 100 mM, 120 mM, 130 mM, 140 mM, 150 mM, 160 mM, 170 mM, 180 mM, 190 mM, or 200 mM.

[0371] In some aspects, the salt concentration includes, but is not limited to, a concentration of about 1 mg/mL to about 100 mg/mL, about 1 mg/mL to about 50 mg/mL, about 1 mg/mL to about 40 mg/mL, about 1 mg/mL to about 30 mg/mL, about 1 mg/mL to about 20 mg/mL, about 1 mg/mL to about 10 mg/mL, or about 1 mg/mL to about 15 mg/mL. In some aspects, the concentration of the salt is equal to at least, at most, exactly, or between any two of 1 mg/mL, 2 mg/mL, 3 mg/mL, 4 mg/mL, 5 mg/mL, 6 mg/mL, 7 mg/mL, 8 mg/mL, 9 mg/mL, 10 mg/mL, 11 mg/mL, 12 mg/mL, 13 mg/mL, 14 mg/mL, 15 mg/mL, 16 mg/mL, 17 mg/mL, 18 mg/mL, 19 mg/mL, 20 mg/mL, or more. The salt may be at a neutral pH, pH 6.5 to 8.5, pH 7.0 to pH 8.0, or pH 7.2 to pH 7.6. For example, the salt may be at a pH equal to at least, at most, exactly, or between any two of 6.5, 6.6, 6.7, 6.8, 6.9, 7, 7.1, 7.2, 7.3, 7.4, 7.5, 7.6, 7.7, 7.8, 7.9, 8, 8.1, 8.2, 8.3, 8.4, or 8.5.

[0372] In some aspects, the immunogenic composition including a lipid-based delivery system further comprises a surfactant, a preservative, any other excipient, or a combination thereof. As used herein, “any other excipient” includes, but is not limited to, antioxidants, glutathione, EDTA, methionine, desferal, antioxidants, metal scavengers, or free radical scavengers. In one aspect, the surfactant, preservative, excipient or combination thereof is sterile water for injection (sWFI), bacteriostatic water for injection (BWFI), saline, dextrose solution, polysorbates, poloxamers, Triton, divalent cations, Ringer's lactate, amino acids, sugars, polyols, polymers, or cyclodextrins.

[0373] Examples of excipients, which refer to ingredients in the immunogenic compositions that are not active ingredients, include but are not limited to carriers, binders, diluents, lubricants, thickeners, surface active agents, preservatives, stabilizers, emulsifiers, buffers, flavoring agents, disintegrants, coatings, plasticizers, compression agents, wet granulation agents, or colorants. Preservatives for use in the compositions disclosed herein include but are not limited to benzalkonium chloride, chlorobutanol, paraben and thimerosal. As used herein, “pharmaceutically acceptable carrier” includes any and all aqueous solvents (e.g., water, alcoholic/aqueous solutions, saline solutions, parenteral vehicles, such as sodium chloride, Ringer's dextrose, etc.), non-aqueous solvents (e.g., propylene glycol, polyethylene glycol, vegetable oil, and injectable organic esters, such as ethyloleate), dispersion media, coatings, surfactants, antioxidants, preservatives (e.g., antibacterial or antifungal agents, anti-oxidants, chelating agents, and inert gases), isotonic agents, absorption delaying agents, salts, drugs, drug stabilizers, gels, binders, excipients, disintegration agents, lubricants, sweetening agents, flavoring agents, dyes, fluid and nutrient replenishers, such like materials and combinations thereof, as would be known to one of ordinary skill in the art. Diluents, or diluting or thinning agents, include but are not limited to ethanol, glycerol, water, sugars such as lactose, sucrose, mannitol, and sorbitol, and starches derived from wheat, corn rice, and potato, and celluloses such as microcrystalline cellulose. The amount of diluent in the composition may range from about 10% to about 90% by weight of the total composition, about 25% to about 75%, about 30% to about 60% by weight, or about 12% to about 60%.

[0374] The pH and exact concentration of the various components in the immunogenic composition including a lipid-based delivery system are adjusted according to well-known parameters. The use of such media and agents for pharmaceutical active substances is well known in the art. Except insofar as any conventional media or agent is incompatible with the active ingredients, its use in immunogenic, prophylactic and/or therapeutic compositions is contemplated.

[0375] In one aspect, a pharmaceutical composition comprises a VZV RNA molecule encoding a VZV polypeptide as disclosed herein that is complexed with, encapsulated in, and/or formulated with one or more lipids to form VZV RNA-LNPs. In some aspects, the VZV RNA-LNP composition is a liquid. In some aspects, the VZV RNA-LNP composition is frozen. In some aspects, the VZV RNA-LNP composition is lyophilized. In some aspects, a VZV RNA-LNP composition comprises a VZV RNA polynucleotide molecule encoding a VZV polypeptide as disclosed herein, encapsulated in LNPs with a lipid composition of a cationic lipid, a PEGylated lipid (i.e. PEG-lipid), and one or more structural lipids (e.g., a neutral lipid).

[0376] In some aspects, a VZV RNA-LNP composition comprises an cationic lipid. The cationic lipid may comprise any one or more cationic lipids disclosed herein. In specific aspects, the cationic lipid comprises ((4-hydroxybutyl)azanediyl)bis(hexane-6,1-diyl)bis(2-hexyldecanoate) (ALC-0315). In some aspects, the cationic lipid (e.g., ALC-0315) is included in the composition at a concentration of at least, at most, between any two of, or exactly 0.01, 0.02, 0.03, 0.04, 0.05, 0.06, 0.07, 0.08, 0.09, 0.1, 0.11, 0.12, 0.13, 0.14, 0.15, 0.16, 0.17, 0.18, 0.19, 0.2, 0.21, 0.22, 0.23, 0.24, 0.25, 0.26, 0.27, 0.28, 0.29, 0.3, 0.31, 0.32, 0.33, 0.34, 0.35, 0.36, 0.37, 0.38, 0.39, 0.4, 0.41, 0.42, 0.43, 0.44, 0.45, 0.46, 0.47, 0.48, 0.49, 0.5, 0.51, 0.52, 0.53, 0.54, 0.55, 0.56, 0.57, 0.58, 0.59, 0.6, 0.61, 0.62, 0.63, 0.64, 0.65, 0.66, 0.67, 0.68, 0.69, 0.7, 0.71, 0.72, 0.73, 0.74, 0.75, 0.76, 0.77, 0.78, 0.79, 0.8, 0.81, 0.82, 0.83, 0.84, 0.85, 0.86, 0.87, 0.88, 0.89, 0.9, 0.91, 0.92, 0.93, 0.94, 0.95, 0.96, 0.97, 0.98, 0.99, 1, 1.01, 1.02, 1.03, 1.04, 1.05, 1.06, 1.07, 1.08, 1.09, 1.1, 1.11, 1.12, 1.13, 1.14, 1.15, 1.16, 1.17, 1.18, 1.19, 1.2, 1.21, 1.22, 1.23, 1.24, 1.25, 1.26, 1.27, 1.28, 1.29, 1.3, 1.31, 1.32, 1.33, 1.34, 1.35, 1.36, 1.37, 1.38, 1.39, 1.4, 1.41, 1.42, 1.43, 1.44, 1.45, 1.46, 1.47, 1.48, 1.49, 1.5, 1.51, 1.52, 1.53, 1.54, 1.55, 1.56, 1.57, 1.58, 1.59, 1.6, 1.61, 1.62, 1.63, 1.64, 1.65, 1.66, 1.67, 1.68, 1.69, 1.7, 1.71, 1.72, 1.73, 1.74, 1.75, 1.76, 1.77, 1.78, 1.79, 1.8, 1.81, 1.82, 1.83, 1.84, 1.85, 1.86, 1.87, 1.88, 1.89, 1.9, 1.91, 1.92, 1.93, 1.94, 1.95, 1.96, 1.97, 1.98, 1.99, or 2 ng/μg/mg per mL. In some aspects, the cationic lipid (e.g., ALC-0315) is included in the composition at a concentration of at least, at most, between any two of, or exactly 0.4, 0.41, 0.42, 0.43, 0.44, 0.45, 0.46, 0.47, 0.48, 0.49, 0.5, 0.51, 0.52, 0.53, 0.54, 0.55, 0.56, 0.57, 0.58, 0.59, 0.6, 0.61, 0.62, 0.63, 0.64, 0.65, 0.66, 0.67, 0.68, 0.69, 0.7, 0.71, 0.72, 0.73, 0.74, 0.75, 0.76, 0.77, 0.78, 0.79, 0.8, 0.81, 0.82, 0.83, 0.84, 0.85, 0.86, 0.87, 0.88, 0.89, 0.9, 0.91, 0.92, 0.93, 0.94, 0.95, 0.96, 0.97, 0.98, 0.99, or 1 mg/mL. In some aspects, the cationic lipid (e.g., ALC-0315) is included in the composition at a concentration of at least 0.4, at least 0.45, at least 0.5, at least 0.55, at least 0.6, at least 0.65, at least 0.7, at least 0.75, at least 0.8, at least 0.85, at least 0.9, at least 0.95 or at least 1 mg/mL. In some aspects, the cationic lipid (e.g., ALC-0315) is included in the composition at a concentration of between 0.4 and 0.5, between 0.5 and 0.6, between 0.6 and 0.7, between 0.7 and 0.8, between 0.8 and 0.9, or between 0.9 and 1. In some aspects, the cationic lipid (e.g., ALC-0315) is included in the composition at a concentration of between 0.4 and 0.45, between 0.45 and 0.5, between 0.5 and 0.55, between 0.55 and 0.6, between 0.6 and 0.65, between 0.65 and 0.7, between 0.7 and 0.75, between 0.75 and 0.8, between 0.8 and 0.85, between 0.85 and 0.9, between 0.9 and 0.95, or between 0.95 and 1 mg/mL.

[0377] In specific aspects, the cationic lipid (e.g., ALC-0315) is included in the composition at a concentration of 0.8 to 0.95 mg/mL. In specific aspects, the cationic lipid (e.g., ALC-0315) is included in the composition at a concentration of about 0.8 to 0.9 mg/mL. In specific aspects, the cationic lipid (e.g., ALC-0315) is included in the composition at a concentration of about 0.85 to 0.9 mg/mL. In specific aspects, the cationic lipid (e.g., ALC-0315) is included in the composition at a concentration of about 0.8, 0.81, 0.82, 0.83, 0.84, 0.85, 0.86, 0.87, 0.88, 0.89, 0.9, 0.91, 0.92, 0.93, 0.94, or 0.95 mg/mL. In specific aspects, the cationic lipid (e.g., ALC-0315) is included in the composition at a concentration of about 0.86 mg/mL. Concentrations for lyophilized compositions are determined post-reconstitution.

[0378] In some aspects, a VZV RNA-LNP composition further comprises a PEGylated lipid (i.e., PEG-lipid). The PEGylated lipid may comprise any one or more PEGylated lipids disclosed herein. In specific aspects, the PEGylated lipid comprises 2-[(polyethylene glycol)-2000]-N,N-ditetradecylacetamide (ALC-0159). In some aspects, the PEGylated lipid (e.g., ALC-0159) is included in the composition at a concentration of at least, at most, between any two of, or exactly 0.01, 0.02, 0.03, 0.04, 0.05, 0.06, 0.07, 0.08, 0.09, 0.1, 0.11, 0.12, 0.13, 0.14, 0.15, 0.16, 0.17, 0.18, 0.19, 0.2, 0.21, 0.22, 0.23, 0.24, 0.25, 0.26, 0.27, 0.28, 0.29, 0.3, 0.31, 0.32, 0.33, 0.34, 0.35, 0.36, 0.37, 0.38, 0.39, 0.4, 0.41, 0.42, 0.43, 0.44, 0.45, 0.46, 0.47, 0.48, 0.49, 0.5, 0.51, 0.52, 0.53, 0.54, 0.55, 0.56, 0.57, 0.58, 0.59, 0.6, 0.61, 0.62, 0.63, 0.64, 0.65, 0.66, 0.67, 0.68, 0.69, 0.7, 0.71, 0.72, 0.73, 0.74, 0.75, 0.76, 0.77, 0.78, 0.79, 0.8, 0.81, 0.82, 0.83, 0.84, 0.85, 0.86, 0.87, 0.88, 0.89, 0.9, 0.91, 0.92, 0.93, 0.94, 0.95, 0.96, 0.97, 0.98, 0.99, 1, 1.01, 1.02, 1.03, 1.04, 1.05, 1.06, 1.07, 1.08, 1.09, 1.1, 1.11, 1.12, 1.13, 1.14, 1.15, 1.16, 1.17, 1.18, 1.19, 1.2, 1.21, 1.22, 1.23, 1.24, 1.25, 1.26, 1.27, 1.28, 1.29, 1.3, 1.31, 1.32, 1.33, 1.34, 1.35, 1.36, 1.37, 1.38, 1.39, 1.4, 1.41, 1.42, 1.43, 1.44, 1.45, 1.46, 1.47, 1.48, 1.49, 1.5, 1.51, 1.52, 1.53, 1.54, 1.55, 1.56, 1.57, 1.58, 1.59, 1.6, 1.61, 1.62, 1.63, 1.64, 1.65, 1.66, 1.67, 1.68, 1.69, 1.7, 1.71, 1.72, 1.73, 1.74, 1.75, 1.76, 1.77, 1.78, 1.79, 1.8, 1.81, 1.82, 1.83, 1.84, 1.85, 1.86, 1.87, 1.88, 1.89, 1.9, 1.91, 1.92, 1.93, 1.94, 1.95, 1.96, 1.97, 1.98, 1.99, or 2 ng/μg/mg per mL. In some aspects, the PEGylated lipid (e.g., ALC-0159) is included in the composition at a concentration of at least, at most, between any two of, or exactly 0.01, 0.02, 0.03, 0.04, 0.05, 0.06, 0.07, 0.08, 0.09, 0.1, 0.11, 0.12, 0.13, 0.14, 0.15, 0.16, 0.17, 0.18, 0.19, 0.2, 0.21, 0.22, 0.23, 0.24, 0.25, 0.26, 0.27, 0.28, 0.29, 0.3, 0.31, 0.32, 0.33, 0.34, 0.35, 0.36, 0.37, 0.38, 0.39, 0.4, 0.41, 0.42, 0.43, 0.44, 0.45, 0.46, 0.47, 0.48, 0.49, or 0.5 mg/mL. In some aspects, the PEGylated lipid (e.g., ALC-0159) is included in the composition at a concentration of at least 0.01, at least 0.05, at least 0.1, at least 0.15, at least 0.2, at least 0.25 mg/mL, at least 0.3 mg/mL, at least 0.35 mg/mL, at least 0.4 mg/mL, at least 0.45 mg/mL or at least 0.5 mg/mL. In some aspects, the PEGylated lipid (e.g., ALC-0159) is included in the composition at a concentration of between 0.01 and 0.05, between 0.05 and 0.1, between 0.1 and 0.15, between 0.15 and 0.2, or between 0.2 and 0.25 mg/mL.

[0379] In specific aspects, the PEGylated lipid (e.g., ALC-0159) is included in the composition at a concentration of about 0.05 to 0.15 mg/mL. In specific aspects, the PEGylated lipid (e.g., ALC-0159) is included in the composition at a concentration of about 0.10 to 0.15 mg/mL. In specific aspects, the PEGylated lipid (e.g., ALC-0159) is included in the composition at a concentration of about 0.05, 0.06, 0.07, 0.08, 0.09, 0.1, 0.11, 0.12, 0.13, 0.14 or 0.15 mg/mL. In specific aspects, the PEGylated lipid (e.g., ALC-0159) is included in the composition at a concentration of about 0.11 mg/mL Concentrations for lyophilized compositions are determined post-reconstitution.

[0380] In some aspects, a VZV RNA-LNP composition further comprises one or more structural lipids. The one or more structural lipids may comprise any one or more structural lipids disclosed herein. In specific aspects, the one or more structural lipids comprise a neutral lipid and a steroid or steroid analog. In specific aspects, the one or more structural lipids comprise 1,2-Distearoyl-sn-glycero-3-phosphocholine (DSPC) and cholesterol. In some aspects, the one or more structural lipids (e.g., DSPC and cholesterol) are included in the composition at a concentration of at least, at most, between any two of, or exactly 0.01, 0.02, 0.03, 0.04, 0.05, 0.06, 0.07, 0.08, 0.09, 0.1, 0.11, 0.12, 0.13, 0.14, 0.15, 0.16, 0.17, 0.18, 0.19, 0.2, 0.21, 0.22, 0.23, 0.24, 0.25, 0.26, 0.27, 0.28, 0.29, 0.3, 0.31, 0.32, 0.33, 0.34, 0.35, 0.36, 0.37, 0.38, 0.39, 0.4, 0.41, 0.42, 0.43, 0.44, 0.45, 0.46, 0.47, 0.48, 0.49, 0.5, 0.51, 0.52, 0.53, 0.54, 0.55, 0.56, 0.57, 0.58, 0.59, 0.6, 0.61, 0.62, 0.63, 0.64, 0.65, 0.66, 0.67, 0.68, 0.69, 0.7, 0.71, 0.72, 0.73, 0.74, 0.75, 0.76, 0.77, 0.78, 0.79, 0.8, 0.81, 0.82, 0.83, 0.84, 0.85, 0.86, 0.87, 0.88, 0.89, 0.9, 0.91, 0.92, 0.93, 0.94, 0.95, 0.96, 0.97, 0.98, 0.99, 1, 1.01, 1.02, 1.03, 1.04, 1.05, 1.06, 1.07, 1.08, 1.09, 1.1, 1.11, 1.12, 1.13, 1.14, 1.15, 1.16, 1.17, 1.18, 1.19, 1.2, 1.21, 1.22, 1.23, 1.24, 1.25, 1.26, 1.27, 1.28, 1.29, 1.3, 1.31, 1.32, 1.33, 1.34, 1.35, 1.36, 1.37, 1.38, 1.39, 1.4, 1.41, 1.42, 1.43, 1.44, 1.45, 1.46, 1.47, 1.48, 1.49, 1.5, 1.51, 1.52, 1.53, 1.54, 1.55, 1.56, 1.57, 1.58, 1.59, 1.6, 1.61, 1.62, 1.63, 1.64, 1.65, 1.66, 1.67, 1.68, 1.69, 1.7, 1.71, 1.72, 1.73, 1.74, 1.75, 1.76, 1.77, 1.78, 1.79, 1.8, 1.81, 1.82, 1.83, 1.84, 1.85, 1.86, 1.87, 1.88, 1.89, 1.9, 1.91, 1.92, 1.93, 1.94, 1.95, 1.96, 1.97, 1.98, 1.99, or 2 ng/μg/mg per mL. In some aspects, the one or more structural lipids (e.g., DSPC and cholesterol) are included in the composition at a concentration of at least, at most, between any two of, or exactly 0.01, 0.02, 0.03, 0.04, 0.05, 0.06, 0.07, 0.08, 0.09, 0.1, 0.11, 0.12, 0.13, 0.14, 0.15, 0.16, 0.17, 0.18, 0.19, 0.2, 0.21, 0.22, 0.23, 0.24, 0.25, 0.26, 0.27, 0.28, 0.29, 0.3, 0.31, 0.32, 0.33, 0.34, 0.35, 0.36, 0.37, 0.38, 0.39, 0.4, 0.41, 0.42, 0.43, 0.44, 0.45, 0.46, 0.47, 0.48, 0.49, or 0.5 mg/mL. In some aspects, the one or more structural lipids (e.g., DSPC and cholesterol) are included in the composition at a concentration of at least 0.05, at least 0.1, at least 0.15, at least 0.2, at least 0.25, at least 0.3, at least 0.35, at least 0.4, at least 0.45, at least 0.5, at least 0.55, at least 0.6, at least 0.65, at least 0.7, at least 0.75, at least 0.8, at least 0.85, at least 0.9, at least 0.95 or at least 1 mg/mL. In some aspects, the one or more structural lipids (e.g., DSPC and cholesterol) are included in the composition at a concentration of between 0.05 and 0.1, between 0.1 and 0.15, between 0.15 and 0.2, between 0.2 and 0.25, between 0.25 and 0.3, between 0.3 and 0.35, between 0.35 and 0.4, between 0.4 and 0.45, between 0.45 and 0.5, between 0.5 and 0.55, between 0.55 and 0.6, between 0.6 and 0.65, between 0.65 and 0.7, between 0.7 and 0.75, between 0.75 and 0.8, between 0.8 and 0.85, between 0.85 and 0.9, between 0.9 and 0.95 or between 0.95 and 1 mg/mL.

[0381] In specific aspects, the one or more structural lipids include DSPC, and the DSPC is included in the composition at a concentration of about 0.1 to 0.25 mg/mL. In specific aspects, the one or more structural lipids include DSPC, and the DSPC is included in the composition at a concentration of about 0.15 to 0.25 mg/mL. In specific aspects, the one or more structural lipids include DSPC, and the DSPC is included in the composition at a concentration of about 0.1, 0.11, 0.12, 0.13, 0.14, 0.15, 0.16, 0.17, 0.18, 0.19, 0.2, 0.21, 0.22, 0.23, 0.24 or 0.25 mg/mL. In specific aspects, the DSPC is included in the composition at a concentration of about 0.19 mg/mL.

[0382] In specific aspects, the one or more structural lipids include cholesterol, and the cholesterol is included in the composition at a concentration of about 0.3 to 0.45 mg/mL. In specific aspects, the one or more structural lipids include cholesterol, and the cholesterol is included in the composition at a concentration of about 0.3 to 0.4. In specific aspects, the one or more structural lipids include cholesterol, and the cholesterol is included in the composition at a concentration of about 0.35 to 0.45. In specific aspects, the one or more structural lipids include cholesterol, and the cholesterol is included in the composition at a concentration of about 0.30, 0.31, 0.32, 0.33, 0.34, 0.35, 0.36, 0.37, 0.38, 0.39, 0.40, 0.41, 0.42, 0.43, 0.44, or 0.45 mg/mL. In specific aspects, the cholesterol is included in the composition at a concentration of about 0.37 mg/mL. Concentrations for lyophilized compositions are determined post-reconstitution.

[0383] In some aspects, the VZV RNA-LNP composition further comprises one or more buffers and stabilizing agents, and optionally, salt diluents. Thus, in some aspects, the VZV RNA-LNP composition comprises an cationic lipid, a PEGylated lipid, one or more structural lipids, one or more buffers, a stabilizing agent, and optionally, a salt diluent.

[0384] In some aspects, a VZV RNA-LNP composition comprises one or more buffers. The one or more buffers may comprise any one or more buffering agents disclosed herein. In specific aspects, the composition comprises a Tris buffer comprising at least a first buffer and a second buffer. In some aspects, the first buffer is tromethamine. In some aspects, the second buffer is Tris hydrochloride (HCl). In some aspects, the first buffer and second buffer of the Tris buffer (e.g., tromethamine and Tris HCl) are included in the composition at a concentration of at least, at most, between any two of, or exactly 0.01, 0.02, 0.03, 0.04, 0.05, 0.06, 0.07, 0.08, 0.09, 0.1, 0.11, 0.12, 0.13, 0.14, 0.15, 0.16, 0.17, 0.18, 0.19, 0.2, 0.21, 0.22, 0.23, 0.24, 0.25, 0.26, 0.27, 0.28, 0.29, 0.3, 0.31, 0.32, 0.33, 0.34, 0.35, 0.36, 0.37, 0.38, 0.39, 0.4, 0.41, 0.42, 0.43, 0.44, 0.45, 0.46, 0.47, 0.48, 0.49, 0.5, 0.51, 0.52, 0.53, 0.54, 0.55, 0.56, 0.57, 0.58, 0.59, 0.6, 0.61, 0.62, 0.63, 0.64, 0.65, 0.66, 0.67, 0.68, 0.69, 0.7, 0.71, 0.72, 0.73, 0.74, 0.75, 0.76, 0.77, 0.78, 0.79, 0.8, 0.81, 0.82, 0.83, 0.84, 0.85, 0.86, 0.87, 0.88, 0.89, 0.9, 0.91, 0.92, 0.93, 0.94, 0.95, 0.96, 0.97, 0.98, 0.99, 1, 1.01, 1.02, 1.03, 1.04, 1.05, 1.06, 1.07, 1.08, 1.09, 1.1, 1.11, 1.12, 1.13, 1.14, 1.15, 1.16, 1.17, 1.18, 1.19, 1.2, 1.21, 1.22, 1.23, 1.24, 1.25, 1.26, 1.27, 1.28, 1.29, 1.3, 1.31, 1.32, 1.33, 1.34, 1.35, 1.36, 1.37, 1.38, 1.39, 1.4, 1.41, 1.42, 1.43, 1.44, 1.45, 1.46, 1.47, 1.48, 1.49, 1.5, 1.51, 1.52, 1.53, 1.54, 1.55, 1.56, 1.57, 1.58, 1.59, 1.6, 1.61, 1.62, 1.63, 1.64, 1.65, 1.66, 1.67, 1.68, 1.69, 1.7, 1.71, 1.72, 1.73, 1.74, 1.75, 1.76, 1.77, 1.78, 1.79, 1.8, 1.81, 1.82, 1.83, 1.84, 1.85, 1.86, 1.87, 1.88, 1.89, 1.9, 1.91, 1.92, 1.93, 1.94, 1.95, 1.96, 1.97, 1.98, 1.99, or 2 ng/μg/mg per mL. Concentrations for lyophilized compositions are determined post-reconstitution.

[0385] In some aspects, the VZV RNA-LNP composition is a liquid composition comprising a Tris buffer. In some aspects, the Tris buffer comprises a first buffer. In some aspects, the first buffer is tromethamine. In some aspects, the first buffer (e.g., tromethamine) is included in the liquid composition at a concentration of at least, at most, between any two of, or exactly 0.01, 0.02, 0.03, 0.04, 0.05, 0.06, 0.07, 0.08, 0.09, 0.1, 0.11, 0.12, 0.13, 0.14, 0.15, 0.16, 0.17, 0.18, 0.19, 0.2, 0.21, 0.22, 0.23, 0.24, 0.25, 0.26, 0.27, 0.28, 0.29, 0.3, 0.31, 0.32, 0.33, 0.34, 0.35, 0.36, 0.37, 0.38, 0.39, 0.4, 0.41, 0.42, 0.43, 0.44, 0.45, 0.46, 0.47, 0.48, 0.49, or 0.5 mg/mL. In some aspects, the first buffer (e.g., tromethamine) is included in the liquid composition at a concentration of at least 0.1, at least 0.05, at least 0.1, at least 0.15, at least 0.2, at least 0.25, at least 0.3, at least 0.35, at least 0.4, at least 0.45, at least 0.5, at least 0.55, at least 0.6, at least 0.65, at least 0.7, at least 0.75, at least 0.8, at least 0.85, at least 0.9, at least 0.95 or at least 1 mg/mL. In some aspects, the first buffer (e.g., tromethamine) is included in the liquid composition at a concentration of between 0.05 and 0.15, between 0.15 and 0.25, between 0.25 and 0.35, between 0.35 and 0.45, between 0.45 and 0.55, between 0.55 and 0.65, between 0.65 and 0.75, between 0.75 and 0.85, or between 0.85 and 0.95. In some aspects, the first buffer (e.g., tromethamine) is included in the liquid composition at a concentration of between 0.05 and 0.1, between 0.1 and 0.15, between 0.15 and 0.2, between 0.2 and 0.25, between 0.25 and 0.3, between 0.3 and 0.35, between 0.35 and 0.4, between 0.4 and 0.45, between 0.45 and 0.5, between 0.5 and 0.55, between 0.55 and 0.6, between 0.6 and 0.65, between 0.65 and 0.7, between 0.7 and 0.75, between 0.75 and 0.8, between 0.8 and 0.85, between 0.85 and 0.9, between 0.9 and 0.95 or between 0.95 and 1 mg/mL.

[0386] In specific aspects, the first buffer (e.g., tromethamine) is included in the liquid composition at a concentration of about 0.1 to 0.3 mg/mL. In specific aspects, the first buffer (e.g., tromethamine) is included in the liquid composition at a concentration of about 0.15 to 0.25 mg/mL. In specific aspects, the first buffer (e.g., tromethamine) is included in the liquid composition at a concentration of about 0.1, 0.11, 0.12, 0.13, 0.14, 0.15, 0.16, 0.17, 0.18, 0.19, 0.20, 0.21, 0.22, 0.23, 0.24, 0.25, 0.26, 0.27, 0.28, 0.29 or 0.3 mg/mL. In specific aspects, the first buffer (e.g., tromethamine) is included in the liquid composition at a concentration of about 0.20 mg/mL.

[0387] In some aspects, the VZV RNA-LNP composition is a liquid composition comprising a Tris buffer comprising a second buffer. In some aspects, the second buffer comprises Tris HCl. In some aspects, the second buffer (e.g., Tris HCl) is included in the liquid composition at a concentration of at least, at most, between any two of, or exactly 0.5, 0.55, 1, 1.01, 1.02, 1.03, 1.04, 1.05, 1.06, 1.07, 1.08, 1.09, 1.1, 1.11, 1.12, 1.13, 1.14, 1.15, 1.16, 1.17, 1.18, 1.19, 1.2, 1.21, 1.22, 1.23, 1.24, 1.25, 1.26, 1.27, 1.28, 1.29, 1.3, 1.31, 1.32, 1.33, 1.34, 1.35, 1.36, 1.37, 1.38, 1.39, 1.4, 1.41, 1.42, 1.43, 1.44, 1.45, 1.46, 1.47, 1.48, 1.49, or 1.5 mg/mL. In some aspects, the second buffer (e.g., Tris HCl) is included in the liquid composition at a concentration of at least 0.5, at least 0.55, at least 0.6, at least 0.65, at least 0.7, at least 0.75, at least 0.8, at least 0.85, at least 0.9, at least 0.95, at least 1, at least 1.05, at least 1.10, at least 1.15, at least 1.20, at least 1.25, at least 1.30, at least 1.35, at least 1.40, at least 1.45, or at least 1.50 mg/mL. In some aspects, the second buffer (e.g., Tris HCl) is included in the liquid composition at a concentration of between 0.5 and 0.6, between 0.6 and 0.7, between 0.7 and 0.8, between 0.8 and 0.9, between 0.9 and 1, between 1 and 1.10, between 1.10 and 1.20, between 1.20 and 1.30, between 1.30 and 1.40, or between 1.40 and 1.50 mg/mL.

[0388] In specific aspects, the second buffer (e.g., Tris HCl) is included in the liquid composition at a concentration of about 1.25 to 1.40 mg/mL. In specific aspects, the second buffer (e.g., Tris HCl) is included in the liquid composition at a concentration of about 1.30 to 1.40 mg/mL. In specific aspects, the second buffer (e.g., Tris HCl) is included in the liquid composition at a concentration of about 1.25, 1.26, 1.27, 1.28, 1.29, 1.30, 1.31, 1.32, 1.33, 1.34, or 1.35, 1.36, 1.37, 1.38, 1.39, or 1.40 mg/mL. In specific aspects, the second buffer (e.g., Tris HCl) is included in the liquid composition at a concentration of about 1.32 mg/mL.

[0389] In some aspects, the VZV RNA-LNP composition is a lyophilized composition comprising a Tris buffer. In some aspects, the Tris buffer comprises a first buffer. In some aspects, the first buffer is tromethamine. In some aspects, the first buffer (e.g., tromethamine) is included in the lyophilized composition at a concentration, after reconstitution, of at least, at most, between any two of, or exactly 0.01, 0.02, 0.03, 0.04, 0.05, 0.06, 0.07, 0.08, 0.09, 0.1, 0.11, 0.12, 0.13, 0.14, 0.15, 0.16, 0.17, 0.18, 0.19, 0.2, 0.21, 0.22, 0.23, 0.24, 0.25, 0.26, 0.27, 0.28, 0.29, 0.3, 0.31, 0.32, 0.33, 0.34, 0.35, 0.36, 0.37, 0.38, 0.39, 0.4, 0.41, 0.42, 0.43, 0.44, 0.45, 0.46, 0.47, 0.48, 0.49, or 0.5 mg/mL. In some aspects, the first buffer (e.g., tromethamine) is included in the lyophilized composition at a concentration, after reconstitution, of at least 0.01, of at least 0.05, of at least 0.1, of at least 0.15, of at least 0.2, of at least 0.25, of at least 0.3, of at least 0.35, of at least 0.4, of at least 0.45, or of at least 0.5 mg/mL. In some aspects, the first buffer (e.g., tromethamine (Tris base)) is included in the lyophilized composition at a concentration, after reconstitution, of between 0.01 and 0.05, between 0.05 and 0.1, between 0.1 and 0.15, between 0.15 and 0.2, between 0.2 and 0.25 mg/mL, between 0.25 and 0.3 mg/mL, between 0.3 and 0.35 mg/mL, between 0.35 and 0.4 mg/mL, between 0.4 and 0.45 mg/mL, or between 0.45 and 0.5 mg/mL.

[0390] In specific aspects, the first buffer (e.g., tromethamine) is included in the lyophilized composition at a concentration, after reconstitution, of about 0.01 and 0.15 mg/mL. In specific aspects, the first buffer (e.g., tromethamine) is included in the lyophilized composition at a concentration, after reconstitution, of about 0.01 and 0.10 mg/mL. In specific aspects, the first buffer (e.g., tromethamine) is included in the lyophilized composition at a concentration, after reconstitution, of about 0.05 and 0.15 mg/mL. In specific aspects, the first buffer (e.g., tromethamine) is included in the lyophilized composition at a concentration, after reconstitution, of about 0.01, 0.02, 0.03, 0.04, 0.05, 0.06, 0.07, 0.08, 0.09, 0.1, 0.11, 0.12, 0.13, 0.14, or 0.15 mg/mL. In specific aspects, the first buffer (e.g., tromethamine) is included in the lyophilized composition at a concentration, after reconstitution, of about 0.09 mg/mL.

[0391] In some aspects, the VZV RNA-LNP composition is a lyophilized composition comprising a Tris buffer comprising a second buffer. In some aspects, the second buffer comprises Tris HCl. In some aspects, the second buffer (e.g., Tris HCl) is included in the lyophilized composition at a concentration, after reconstitution, of at least, at most, between any two of, or exactly 0.1, 0.15, 0.2, 0.25, 0.3, 0.35, 0.4, 0.45, 0.5, 0.51, 0.52, 0.53, 0.54, 0.55, 0.56, 0.57, 0.58, 0.59, 0.6, 0.61, 0.62, 0.63, 0.64, 0.65, 0.66, 0.67, 0.68, 0.69, 0.7, 0.71, 0.72, 0.73, 0.74, 0.75, 0.76, 0.77, 0.78, 0.79, 0.8, 0.81, 0.82, 0.83, 0.84, 0.85, 0.86, 0.87, 0.88, 0.89, 0.9, 0.91, 0.92, 0.93, 0.94, 0.95, 0.96, 0.97, 0.98, 0.99, or 1 mg/mL. In some aspects, the second buffer (e.g., Tris HCl) is included in the lyophilized composition at a concentration, after reconstitution, of at least 0.1, at least 0.2, at least 0.3, at least 0.4, at least 0.5, at least 0.6, at least 0.7, at least 0.8, at least 0.9, or at least 1 mg/mL. In some aspects, the second buffer (e.g., Tris HCl) is included in the lyophilized composition at a concentration, after reconstitution, of between 0.1 and 0.2, between 0.2 and 0.3, between 0.3 and 0.4, between 0.4 and 0.5, between 0.5 and 0.6, between 0.6 and 0.7, between 0.7 and 0.8, between 0.8 and 0.9, or between 0.9 and 1 mg/mL.

[0392] In specific aspects, the second buffer (e.g., Tris HCl) is included in the lyophilized composition at a concentration, after reconstitution, of about 0.5 and 0.65 mg/mL. In specific aspects, the second buffer (e.g., Tris HCl) is included in the lyophilized composition at a concentration, after reconstitution, of about 0.5 and 0.6 mg/mL. In specific aspects, the second buffer (e.g., Tris HCl) is included in the lyophilized composition at a concentration, after reconstitution, of about 0.55 and 0.65 mg/mL. In specific aspects, the second buffer (e.g., Tris HCl) is included in the lyophilized composition at a concentration, after reconstitution, of about 0.5, 0.51, 0.52, 0.53, 0.54, 0.55, 0.56, 0.57, 0.58, 0.59, 0.6, 0.61, 0.62, 0.63, 0.64, or 0.65 mg/mL. In specific aspects, the second buffer (e.g., Tris HCl) is included in the lyophilized composition at a concentration, after reconstitution, of about 0.57 mg/mL.

[0393] In some aspects, a VZV RNA-LNP composition comprises a stabilizing agent. The stabilizing agent may comprise any one or more stabilizing agents disclosed herein. In some aspects, the stabilizing agent also functions as a cryoprotectant. In specific aspects, the stabilizing agent comprises sucrose. In some aspects, the stabilizing agent (e.g., sucrose) is included in the composition at a concentration of at least, at most, between any two of, or exactly 1, 2, 3, 4, 5, 6, 7, 8, 9, 10, 11, 12, 13, 14, 15, 16, 17, 18, 19, 20, 21, 22, 23, 24, 25, 26, 27, 28, 29, 30, 31, 32, 33, 34, 35, 36, 37, 38, 39, 40, 41, 42, 43, 44, 45, 46, 47, 48, 49, 50, 51, 52, 53, 54, 55, 56, 57, 58, 59, 60, 61, 62, 63, 64, 65, 66, 67, 68, 69, 70, 71, 72, 73, 74, 75, 76, 77, 78, 79, 80, 81, 82, 83, 84, 85, 86, 87, 88, 89, 90, 91, 92, 93, 94, 95, 96, 97, 98, 99, 100, 101, 102, 103, 104, 105, 106, 107, 108, 109, 110, 111, 112, 113, 114, 115, 116, 117, 118, 119, 120, 121, 122, 123, 124, 125, 126, 127, 128, 129, 130, 131, 132, 133, 134, 135, 136, 137, 138, 139, 140, 141, 142, 143, 144, 145, 146, 147, 148, 149, 150, 151, 152, 153, 154, 155, 156, 157, 158, 159, 160, 161, 162, 163, 164, 165, 166, 167, 168, 169, 170, 171, 172, 173, 174, 175, 176, 177, 178, 179, 180, 181, 182, 183, 184, 185, 186, 187, 188, 189, 190, 191, 192, 193, 194, 195, 196, 197, 198, 199, or 200 ng/μg/mg per mL.

[0394] In some aspects, the VZV RNA-LNP composition is a liquid composition, and the stabilizing agent (e.g., sucrose) is included in the liquid composition at a concentration of at least, at most, between any two of, or exactly 70, 71, 72, 73, 74, 75, 76, 77, 78, 79, 80, 81, 82, 83, 84, 85, 86, 87, 88, 89, 90, 91, 92, 93, 94, 95, 96, 97, 98, 99, 100, 101, 102, 103, 104, 105, 106, 107, 108, 109, 110, 111, 112, 113, 114, 115, 116, 117, 118, 119, 120, 121, 122, 123, 124, 125, 126, 127, 128, 129 or 130 mg/mL. In some aspects, the stabilizing agent (e.g., sucrose) is included in the liquid composition at a concentration of at least 70, at least 75, at least 80, at least 85, at least 90, at least 95, at least 100, at least 105, at least 110, at least 115, at least 120, at least 125 or at least 130 mg/mL. In some aspects, the stabilizing agent (e.g., sucrose) is included in the liquid composition at a concentration of between 70 and 80, between 80 and 90, between 90 and 100, between 100 and 110, between 110 and 120, or between 120 and 130 mg/mL.

[0395] In specific aspects, the stabilizing agent (e.g., sucrose) is included in the liquid composition at a concentration of about 95 to 110 mg/mL. In specific aspects, the stabilizing agent (e.g., sucrose) is included in the liquid composition at a concentration of about 95 to 105 mg/mL. In specific aspects, the stabilizing agent (e.g., sucrose) is included in the liquid composition at a concentration of about 100 to 110 mg/mL. In specific aspects, the stabilizing agent (e.g., sucrose) is included in the liquid composition at a concentration of about 95, 96, 97, 98, 99, 100, 101, 102, 103, 104, 105, 106, 107, 108, 109, or 110 mg/mL. In specific aspects, the stabilizing agent (e.g., sucrose) is included in the liquid composition at a concentration of about 103 mg/mL.

[0396] In some aspects, the VZV RNA-LNP composition is a lyophilized composition, and the stabilizing agent (e.g., sucrose) is included in the lyophilized composition at a concentration, after reconstitution, of at least, at most, between any two of, or exactly 20, 21, 22, 23, 24, 25, 26, 27, 28, 29, 30, 31, 32, 33, 34, 35, 36, 37, 38, 39, 40, 41, 42, 43, 44, 45, 46, 47, 48, 49, 50, 51, 52, 53, 54, 55, 56, 57, 58, 59, 60, 61, 62, 63, 64, 65, 66, 67, 68, 69, 70, 71, 72, 73, 74, 75, 76, 77, 78, 79, or 80 mg/mL. In some aspects, the stabilizing agent (e.g., sucrose) is included in the lyophilized composition at a concentration, after reconstitution, of at least 20, at least 25, at least 30, at least 35, at least 40, at least 45, at least 50, at least 55, at least 60, at least 65, at least 70, at least 75 or at least 80 mg/mL. In some aspects, the stabilizing agent (e.g., sucrose) is included in the lyophilized composition at a concentration, after reconstitution, of between 20 to 30, between 30 to 40, between 40 to 50, between 50 to 60, between 60 to 70 or between 70 to 80 mg/mL.

[0397] In specific aspects, the stabilizing agent (e.g., sucrose) is included in the lyophilized composition at a concentration, after reconstitution, of about 35 to 50 mg/mL. In specific aspects, the stabilizing agent (e.g., sucrose) is included in the lyophilized composition at a concentration, after reconstitution, of about 35 to 45 mg/mL. In specific aspects, the stabilizing agent (e.g., sucrose) is included in the lyophilized composition at a concentration, after reconstitution, of about 40 to 50 mg/mL. In specific aspects, the stabilizing agent (e.g., sucrose) is included in the lyophilized composition at a concentration, after reconstitution, of about 35, 36, 37, 38, 39, 40, 41, 42, 43, 44, 45, 46, 47, 48, 49 or 50 mg/mL. In specific aspects, the stabilizing agent (e.g., sucrose) is included in the lyophilized composition at a concentration, after reconstitution, of about 44/mL.

[0398] In some aspects, lyophilized compositions are reconstituted in a suitable carrier or diluent. The carrier or diluent may comprise any one or more carriers or diluents disclosed herein. In specific aspects, the carrier or diluent comprises a salt diluent, such as sodium chloride (NaCl) (e.g., saline, e.g., physiological or normal saline). The sodium chloride may comprise 0.9% sodium chloride for injection. In some aspects, the lyophilized compositions are reconstituted in at least, at most, between any two of, or exactly 0.1, 0.2, 0.3, 0.4, 0.5, 0.6, 0.7, 0.8, 0.9, 0.10, 0.11, 0.12, 0.13, 0.14, 0.15, 0.16, 0.17, 0.18, 0.19, 0.20, 0.21, 0.22, 0.23, 0.24, 0.25, 0.26, 0.27, 0.28, 0.29, 0.30, 0.31, 0.32, 0.33, 0.34, 0.35, 0.36, 0.37, 0.38, 0.39, 0.40, 0.41, 0.42, 0.43, 0.44, 0.45, 0.46, 0.47, 0.48, 0.49, 0.50, 0.51, 0.52, 0.53, 0.54, 0.55, 0.56, 0.57, 0.58, 0.59, 0.60, 0.61, 0.62, 0.63, 0.64, 0.65, 0.66, 0.67, 0.68, 0.69, 0.70, 0.71, 0.72, 0.73, 0.74, 0.75, 0.76, 0.77, 0.78, 0.79, 0.80, 0.81, 0.82, 0.83, 0.84, 0.85, 0.86, 0.87, 0.88, 0.89, 0.90, 0.91, 0.92, 0.93, 0.94, 0.95, 0.96, 0.97, 0.98, 0.99, or 1 mL of saline. In some aspects, the lyophilized compositions are reconstituted in at least 0.1, at least 0.2, at least 0.3, at least 0.4, at least 0.5, at least 0.6, at least 0.7, at least 0.8, at least 0.9, or at least 1 mL of sodium chloride.

[0399] In specific aspects, the lyophilized compositions are reconstituted in about 0.6 to 0.75 mL of sodium chloride/saline. In specific aspects, the lyophilized compositions are reconstituted in about 0.65 to 0.75 mL of sodium chloride/saline. In specific aspects, the lyophilized compositions are reconstituted in about 0.6, 0.61, 0.62, 0.63, 0.64, 0.65, 0.66, 0.67, 0.68, 0.69, 0.7, 0.71, 0.72, 0.73, 0.74 or 0.75 mL of sodium chloride/saline.

[0400] In some aspects, the salt diluent (e.g., NaCl) is included in the lyophilized composition at a concentration, after reconstitution, of at least, at most, between any two of, or exactly 0.5, 1, 1.5, 2, 2.5, 3, 3.5, 4, 4.5, 5, 5.5, 6, 6.5, 7, 7.5, 8, 8.5, 9, 9.5, 10, 10.5, 11, 11.5, 12, 12.5, 13, 13.5, 14, 14.5, 15, 15.5, 16, 16.5, 17, 17.5, 18, 18.5, 19, 19.5, 20, 20.5, 21, 21.5, 22, 22.5, 23, 23.5, 24, 24.5, 25, 25.5, 26, 26.5, 27, 27.5, 28, 28.5, 29, 29.5, 30, 30.5, 31, 31.5, 32, 32.5, 33, 33.5, 34, 34.5, 35, 35.5, 36, 36.5, 37, 37.5, 38, 38.5, 39, 39.5, 40, 40.5, 41, 41.5, 42, 42.5, 43, 43.5, 44, 44.5, 45, 45.5, 46, 46.5, 47, 47.5, 48, 48.5, 49, 49.5, or 50 ng/μg/mg per mL. In some aspects, the salt diluent (e.g., NaCl) is included in the lyophilized composition at a concentration, after reconstitution, of in at least, at most, between any two of, or exactly 1, 1.5, 2, 2.5, 3, 3.5, 4, 4.5, 5, 5.5, 6, 6.5, 7, 7.5, 8, 8.5, 9, 9.5, 10, 10.5, 11, 11.5, 12, 12.5, 13, 13.5, 14, 14.5, 15, 15.5, 16, 16.5, 17, 17.5, 18, 18.5, 19, 19.5, or 20 mg/mL. In some aspects, the salt diluent (e.g., NaCl) is included in the lyophilized composition at a concentration, after reconstitution, of at least 1, at least 2, at least 3, at least 4, at least 5, at least 6, at least 7, at least 8, at least 9, at least 10, at least 11, at least 12, at least 13, at least 14, at least 15, or at least 20 mg/mL.

[0401] In specific aspects, the salt diluent (e.g., NaCl) is included in the lyophilized composition at a concentration, after reconstitution, of between about 5 and 15 mg/mL. In some aspects, the salt diluent (e.g., NaCl) is included in the lyophilized composition at a concentration, after reconstitution, of between about 5 and 10 mg/mL. In specific aspects, the salt diluent (e.g., NaCl) is included in the lyophilized composition at a concentration, after reconstitution, of about 5, 6, 7, 8, 9, 10, 11, 12, 13, 14, or 15 mg/mL. In specific aspects, the salt diluent (e.g., NaCl) is included in the lyophilized composition at a concentration, after reconstitution, of about 9 mg/mL.

[0402] The pH of the VZV RNA-LNP composition may be at least, at most, exactly, or between any two of pH 6.5, 6.6, 6.7, 6.8, 6.9, 7.0, 7.1, 7.2, 7.3, 7.4, 7.5, 7.6, 7.7, 7.8, 7.9, 8.0, 8.1, 8.2, 8.3, 8.4, or 8.5, or any range or value derivable therein. In some aspects, the VZV RNA-LNP composition is at a pH of at least 6.5, at least 7.0, at least 7.5, at least 8.0, or at least 8.5. In specific aspects, the VZV RNA-LNP composition is at a pH between 6.0 and 7.5, between 6.5 and 7.5, between 7.0 and 8.0, between and 7.5 and 8.5. In specific aspects, the VZV RNA-LNP composition is between 7.0 and 8.0. In specific aspects, the VZV RNA-LNP composition is at pH 7.0, 7.1, 7.2, 7.3, 7.4, 7.5, 7.6, 7.7, 7.8, 7.9 or 8.0. In specific aspects, the VZV RNA-LNP composition is at about pH 7.4. In some aspects, sodium hydroxide buffer may be used for a buffer pH adjustment.

[0403] In specific aspects, a VZV RNA-LNP composition comprises a VZV RNA polynucleotide encoding a VZV polypeptide as disclosed herein, encapsulated in LNPs with a lipid composition of an cationic lipid at a concentration of about 0.8 to 0.95 mg/mL, a PEGylated lipid at a concentration of about 0.05 to 0.15 mg/mL, a first structural lipid at a concentration of about 0.1 to 0.25 mg/mL, and a second structural lipid at a concentration of about 0.3 to 0.45 mg/mL.

[0404] In specific aspects, a VZV RNA-LNP composition comprises a VZV RNA polynucleotide encoding a VZV polypeptide as disclosed herein, encapsulated in LNPs with a lipid composition of ALC-0315 at a concentration of about 0.8 to 0.95 mg/mL, ALC-0159 at a concentration of about 0.05 to 0.15 mg/mL, DSPC at a concentration of about 0.1 to 0.25 mg/mL, and cholesterol at a concentration of about 0.3 to 0.45 mg/mL.

[0405] In specific aspects, the VZV RNA-LNP composition is a liquid VZV RNA-LNP composition, and the liquid VZV RNA-LNP composition further comprises a buffer composition comprising a first buffer at a concentration of about 0.15 to 0.3 mg/mL, a second buffer at a concentration of about 1.25 to 1.4 mg/mL, and a stabilizing agent at a concentration of about 95 to 110 mg/mL. In specific aspects, the VZV RNA-LNP composition is a liquid VZV RNA-LNP composition, and the liquid VZV RNA-LNP composition further comprises a Tris buffer composition comprising tromethamine at a concentration of about 0.1 to 0.3 mg/mL, Tris HCl at a concentration of about 1.25 to 1.4 mg/mL, and sucrose at a concentration of about 95 to 110 mg/mL.

[0406] Thus, in specific aspects, a liquid VZV RNA-LNP composition comprises an cationic lipid at a concentration of about 0.8 to 0.95 mg/mL, a PEGylated lipid at a concentration of about 0.05 to 0.15 mg/mL, a first structural lipid at a concentration of about 0.1 to 0.25 mg/mL, a second structural lipid at a concentration of about 0.3 to 0.45 mg/mL, and further comprises a first buffer at a concentration of about 0.1 to 0.3 mg/mL, a second buffer at a concentration of about 1.25 to 1.4 mg/mL, and a stabilizing agent at a concentration of about 95 to 110 mg/mL.

[0407] Thus, in specific aspects, a liquid VZV RNA-LNP composition comprises ALC-0315 at a concentration of about 0.8 to 0.95 mg/mL, ALC-0159 at a concentration of about 0.05 to 0.15 mg/mL, DSPC at a concentration of about 0.1 to 0.25 mg/mL, cholesterol at a concentration of about 0.3 to 0.45 mg/mL, and further comprises a Tris buffer composition comprising tromethamine at a concentration of about 0.1 to 0.3 mg/mL, Tris HCl at a concentration of about 1.25 to 1.4 mg/mL, and sucrose at a concentration of about 95 to 110 mg/mL.

[0408] In specific aspects, the VZV RNA-LNP composition is a lyophilized VZV RNA-LNP composition, and the lyophilized VZV RNA-LNP composition further comprises (after reconstitution) a first buffer at a concentration of about 0.01 and 0.15 mg/mL, a second buffer at a concentration of about 0.5 and 0.65 mg/mL, a stabilizing agent at a concentration of about 35 to 50 mg/m L, and a salt diluent at a concentration of between about 5 and 15 mg/mL.

[0409] In specific aspects, the VZV RNA-LNP composition is a lyophilized VZV RNA-LNP composition, and the lyophilized VZV RNA-LNP composition further comprises (after reconstitution) a Tris buffer composition comprising tromethamine at a concentration of about 0.01 and 0.15 mg/mL, Tris HCl at a concentration of about 0.5 and 0.65 mg/mL, sucrose at a concentration of about 35 to 50 mg/mL, and sodium chloride (NaCl) at a concentration of about 5 to 15 mg/mL.

[0410] Thus, in specific aspects, a lyophilized VZV RNA-LNP composition comprises (after reconstitution) a cationic lipid at a concentration of about 0.8 to 0.95 mg/mL, a PEGylated lipid at a concentration of about 0.05 to 0.15 mg/mL, a first structural lipid at a concentration of about 0.1 to 0.25 mg/mL, a second structural lipid at a concentration of about 0.3 to 0.45 mg/mL, and further comprises a first buffer at a concentration of about 0.01 and 0.15 mg/mL, a second buffer at a concentration of about 0.5 and 0.65 mg/mL, a stabilizing agent at a concentration of about 35 to 50 mg/mL, and a salt diluent at a concentration of about 5 to 15 mg/mL. In specific aspects, the lyophilized compositions are reconstituted in 0.6 to 0.75 mL of the salt diluent.

[0411] Thus, in some aspects, a lyophilized VZV RNA-LNP composition comprises (after reconstitution) ALC-0315 at a concentration of about 0.8 to 0.95 mg/mL, ALC-0159 at a concentration of about 0.05 to 0.15 mg/mL, DSPC at a concentration of about 0.1 to 0.25 mg/mL, cholesterol at a concentration of about 0.3 to 0.45 mg/mL, and further comprises tromethamine at a concentration of about 0.01 and 0.15 mg/mL, Tris HCl at a concentration of about 0.5 and 0.65 mg/mL, sucrose at a concentration of about 35 to 50 mg/mL, and NaCl at a concentration of about 5 to 15 mg/mL. In specific aspects, the lyophilized compositions are reconstituted in 0.6 to 0.75 mL of NaCl (saline).

[0412] Concentrations in the lyophilized VZV RNA-LNP composition above are determined post-reconstitution.

[0413] In some aspects, a VZV RNA-LNP composition (pre-lyophilization) comprises a cationic lipid at a concentration of about 1.0 to 3.0 mg/mL, a PEGylated lipid at a concentration of about 0.10 to 0.35 mg/mL, a first structural lipid at a concentration of about 0.4 to 0.55 mg/mL, a second structural lipid at a concentration of about 0.85 to 1.0 mg/mL, and further comprises a first buffer at a concentration of about 0.1 and 0.3 mg/mL, a second buffer at a concentration of about 1.25 and 1.40 mg/mL, a stabilizing agent at a concentration of about 95 to 110 mg/mL.

[0414] Thus, in some aspects, a VZV RNA-LNP composition (pre-lyophilization) comprises ALC-0315 at a concentration of about 1.0 to 3.0 mg/mL, ALC-0159 at a concentration of about 0.10 to 0.35 mg/mL, DSPC at a concentration of about 0.4 to 0.55 mg/mL, cholesterol at a concentration of about 0.85 to 1.0 mg/mL, and further comprises tromethamine at a concentration of about 0.1 and 0.3 mg/mL, Tris HCl at a concentration of about 1.25 and 1.40 mg/mL, sucrose at a concentration of about 95 to 110 mg/mL.

[0415] The VZV RNA-LNP compositions further comprise VZV RNA described herein encapsulated in LNPs, see section D. ADMINISTRATION.

[0416] In specific aspects, a VZV RNA-LNP composition is a liquid VZV RNA-LNP composition comprising a VZV RNA polynucleotide encoding a VZV polypeptide as disclosed herein at a concentration of at least, at most, exactly, or between any two of 0.01, 0.15, 0.30, 0.45, 0.60, 0.75, or 0.90 mg/mL, preferably about 0.01 to 0.09 mg/mL, encapsulated in LNPs with a lipid composition of an cationic lipid at a concentration of about 0.8 to 0.95 mg/mL, a PEGylated lipid at a concentration of about 0.05 to 0.15 mg/mL, a first structural lipid at a concentration of about 0.1 to 0.25 mg/mL, and a second structural lipid at a concentration of about 0.3 to 0.45 mg/mL, and further comprising a buffer composition comprising a first buffer at a concentration of about 0.15 to 0.3 mg/mL, a second buffer at a concentration of about 1.25 to 1.4 mg/mL, and a stabilizing agent at a concentration of about 95 to 110 mg/mL.

[0417] In specific aspects, a liquid VZV RNA-LNP composition comprises a VZV RNA polynucleotide encoding a VZV polypeptide as disclosed herein at a concentration of at least, at most, exactly, or between any two of 0.01, 0.15, 0.30, 0.45, 0.60, 0.75, or 0.90 mg/mL, preferably about 0.01 to 0.09 mg/mL, and more preferably about 0.06 mg/mL, encapsulated in LNPs with a lipid composition of ALC-0315 at a concentration of about 0.8 to 0.95 mg/mL, ALC-0159 at a concentration of about 0.05 to 0.15 mg/mL, DSPC at a concentration of about 0.1 to 0.25 mg/mL, and cholesterol at a concentration of about 0.3 to 0.45 mg/mL, and further comprising a Tris buffer composition comprising tromethamine at a concentration of about 0.1 to 0.3 mg/mL, Tris HCl at a concentration of about 1.25 to 1.4 mg/mL, and sucrose at a concentration of about 95 to 110 mg/mL.

[0418] In specific aspects, the VZV RNA-LNP composition is a lyophilized VZV RNA-LNP composition comprising a VZV RNA polynucleotide encoding a VZV polypeptide as disclosed herein at a concentration of at least, at most, exactly, or between any two of 0.01, 0.15, 0.30, 0.45, 0.60, 0.75, or 0.90 mg/mL, preferably about 0.01 to 0.09 mg/mL, encapsulated in LNPs with a lipid composition of a cationic lipid at a concentration of about 0.8 to 0.95 mg/mL, a PEGylated lipid at a concentration of about 0.05 to 0.15 mg/mL, a first structural lipid at a concentration of about 0.1 to 0.25 mg/mL, and a second structural lipid at a concentration of about 0.3 to 0.45 mg/mL, and further comprising a first buffer at a concentration of about 0.01 and 0.15 mg/mL, a second buffer at a concentration of about 0.5 and 0.65 mg/mL, a stabilizing agent at a concentration of about 35 to 50 mg/mL, and a salt diluent at a concentration of 5 to 15 mg/mL. In specific aspects, the lyophilized compositions are reconstituted in 0.6 to 0.75 mL of the salt diluent. Concentrations in the lyophilized VZV RNA-LNP composition are determined post-reconstitution.

[0419] In specific aspects, a lyophilized VZV RNA-LNP composition comprises a VZV RNA polynucleotide encoding a VZV polypeptide as disclosed herein at a concentration of at least, at most, exactly, or between any two of 0.01, 0.15, 0.30, 0.45, 0.60, 0.75, or 0.90 mg/mL, preferably about 0.01 to 0.09 mg/mL, and more preferably about 0.06 mg/mL, encapsulated in LNPs with a lipid composition of ALC-0315 at a concentration of about 0.8 to 0.95 mg/mL, ALC-0159 at a concentration of about 0.05 to 0.15 mg/mL, DSPC at a concentration of about 0.1 to 0.25 mg/mL, and cholesterol at a concentration of about 0.3 to 0.45 mg/mL, and further comprising tromethamine at a concentration of about 0.01 and 0.15 mg/mL, Tris HCl at a concentration of about 0.5 and 0.65 mg/mL, sucrose at a concentration of about 35 to 50 mg/mL, and NaCl at a concentration of about 5 to 15 mg/mL. In specific aspects, the lyophilized compositions are reconstituted in 0.6 to 0.75 mL of the NaCl diluent (saline). Concentrations in the lyophilized VZV RNA-LNP composition are determined post-reconstitution.

[0420] In some aspects, a VZV RNA-LNP composition (pre-lyophilization) comprises a VZV RNA polynucleotide encoding a VZV polypeptide as disclosed herein at a concentration of at least, at most, exactly, or between any two of 0.01, 0.15, 0.30, 0.45, 0.60, 0.75, or 0.90 mg/mL, preferably about 0.01 to 0.09 mg/mL, encapsulated in LNPs with a lipid composition of a cationic lipid at a concentration of about 1.0 to 3.0 mg/mL, a PEGylated lipid at a concentration of about 0.10 to 0.35 mg/mL, a first structural lipid at a concentration of about 0.4 to 0.55 mg/mL, a second structural lipid at a concentration of about 0.85 to 1.0 mg/mL, and further comprises a first buffer at a concentration of about 0.1 and 0.3 mg/mL, a second buffer at a concentration of about 1.25 and 1.40 mg/mL, a stabilizing agent at a concentration of about 95 to 110 mg/mL.

[0421] Thus, in some aspects, a VZV RNA-LNP composition (pre-lyophilization) comprises a VZV RNA polynucleotide encoding a VZV polypeptide as disclosed herein at a concentration of at least, at most, exactly, or between any two of 0.01, 0.15, 0.30, 0.45, 0.60, 0.75, or 0.90 mg/mL, preferably about 0.01 to 0.09 mg/mL, and more preferably 0.15 mg/mL, encapsulated in LNPs with a lipid composition of comprises ALC-0315 at a concentration of about 1.0 to 3.0 mg/mL, ALC-0159 at a concentration of about 0.10 to 0.35 mg/mL, DSPC at a concentration of about 0.4 to 0.55 mg/mL, cholesterol at a concentration of about 0.85 to 1.0 mg/mL, and further comprises tromethamine at a concentration of about 0.1 and 0.3 mg/mL, Tris HCl at a concentration of about 1.25 and 1.40 mg/mL, sucrose at a concentration of about 95 to 110 mg/mL.

[0422] In some aspects, the liquid RNA-LNP immunogenic composition comprises a RNA molecule/polynucleotide encoding a VZV polypeptide as disclosed herein at a concentration of at least, at most, exactly, or between any two of 0.01, 0.15, 0.30, 0.45, 0.60, 0.75, or 0.90 mg/mL, preferably about 0.01 to 0.09 mg/mL, encapsulated in a LNP, and further comprising about 5 to 15 mM Tris buffer, 200 to 400 mM sucrose at a pH of about 7.0 to 8.0.

[0423] In some aspects, the liquid RNA-LNP immunogenic composition comprises a RNA molecule/polynucleotide encoding a VZV polypeptide as disclosed herein at a concentration of at least, at most, exactly, or between any two of 0.01, 0.15, 0.30, 0.45, 0.60, 0.75, or 0.90 mg/mL, preferably about 0.01 to 0.09 mg/mL, and more preferably about 0.06 mg/mL, encapsulated in a LNP, and further comprising about 10 mM Tris buffer, 300 mM sucrose at a pH of about 7.4.

[0424] In some aspects, the RNA-LNP immunogenic composition (pre-lyophilized) comprises a RNA molecule/polynucleotide encoding a VZV polypeptide as disclosed herein at a concentration of at least, at most, exactly, or between any two of 0.01, 0.15, 0.30, 0.45, 0.60, 0.75, or 0.90 mg/mL, preferably about 0.01 to 0.09 mg/mL, encapsulated in a LNP, and further comprising about 5 to 15 mM Tris buffer, 200 to 400 mM sucrose at a pH of about 7.0 to 8.0, and reconstituted with 0.9% sodium chloride diluent.

[0425] In some aspects, the RNA-LNP immunogenic composition (pre-lyophilized) comprises a RNA molecule/polynucleotide encoding a VZV polypeptide as disclosed herein at a concentration of at least, at most, exactly, or between any two of 0.01, 0.15, 0.30, 0.45, 0.60, 0.75, or 0.90 mg/mL, preferably about 0.01 to 0.09 mg/mL, and more preferably 0.15 mg/mL, encapsulated in a LNP, and further comprising about 10 mM Tris buffer, 300 mM sucrose at a pH of about 7.4, and reconstituted with 0.9% sodium chloride diluent.

[0426] B. Vaccines

[0427] In some aspects, a pharmaceutical composition described herein is an immunogenic composition for inducing an immune response. For example, in some aspects, an immunogenic composition is a vaccine. In some aspects, the compositions described herein include at least one isolated nucleic acid or polypeptide molecule as described herein. In specific aspects, the immunogenic compositions comprise nucleic acids, and the immunogenic compositions are nucleic acid vaccines. In some aspects, the immunogenic compositions comprise RNA (e.g. mRNA, saRNA), and vaccines are RNA vaccines. In other aspects, the immunogenic compositions comprise DNA, and vaccines are DNA vaccines. In yet other aspects, the immunogenic compositions comprise a polypeptide, and vaccines are polypeptide vaccines. Conditions and/or diseases that may be treated with the nucleic acid and/or peptide or polypeptide compositions include, but are not limited to, those caused and/or impacted by infection, cancer, rare diseases, and other diseases or conditions caused by overproduction, underproduction, or improper production of protein or nucleic acids.

[0428] In some aspects, the composition is substantially free of one or more impurities or contaminants and, for instance, includes nucleic acid or polypeptide molecules that are equal to at least, at most, exactly, or between any two of 90%, 91%, 92%, 93%, 94%, 95%, 96%, 97%, 98%, or 99% pure; at least 98% pure, or at least 99% pure.

[0429] The present disclosure includes methods for preventing, treating or ameliorating an infection, disease or condition in a subject, including administering to a subject an effective amount of an RNA molecule that includes at least one open reading frame encoding a polypeptide or composition described herein. As such, the disclosure contemplates vaccines for use in both active and passive immunization aspects. Immunogenic compositions, proposed to be suitable for use as a vaccine, may be prepared from RNA molecules encoding polypeptide(s), such as VZV glycoproteins. In certain aspects, immunogenic compositions are lyophilized for more ready formulation into a desired vehicle.

[0430] The preparation of vaccines that contain nucleic acid and/or peptide or polypeptide as active ingredients is generally well understood in the art, as exemplified by U.S. Pat. Nos. 4,608,251; 4,601,903; 4,599,231; 4,599,230; 4,596,792; and 4,578,770, all of which are incorporated herein by reference. Typically, such vaccines are prepared as injectables either as liquid solutions or suspensions: solid forms suitable for solution in or suspension in liquid prior to injection may also be prepared. The preparation may also be emulsified. The active immunogenic ingredient is often mixed with excipients that are pharmaceutically acceptable and compatible with the active ingredient. Suitable excipients are, for example, water, saline, dextrose, glycerol, ethanol, or the like and combinations thereof. In addition, if desired, the vaccine may contain amounts of auxiliary substances such as wetting or emulsifying agents, pH buffering agents, or adjuvants that enhance the effectiveness of the vaccines. In specific aspects, vaccines are formulated with a combination of substances, as described in U.S. Pat. Nos. 6,793,923 and 6,733,754, which are incorporated herein by reference.

[0431] Vaccines may be conventionally administered parenterally, by injection, for example, either subcutaneously or intramuscularly. Additional formulations which are suitable for other modes of administration include suppositories and, in some cases, oral formulations. For suppositories, traditional binders and carriers may include, for example, polyalkalene glycols or triglycerides: such suppositories may be formed from mixtures containing the active ingredient in the range of about 0.5% to about 10%. In some aspects, suppositories may be formed from mixtures containing the active ingredient in the range of about 1% to about 2%. Oral formulations include such normally employed excipients as, for example, pharmaceutical grades of mannitol, lactose, starch, magnesium stearate, sodium saccharine, cellulose, magnesium carbonate and the like. These compositions take the form of solutions, suspensions, tablets, pills, capsules, sustained release formulations or powders and contain about 10% to about 95% of active ingredient.

[0432] The polypeptide-encoding nucleic acid constructs and polypeptides may be formulated into a vaccine as neutral or salt forms. Pharmaceutically-acceptable salts include the acid addition salts (formed with the free amino groups of the peptide) and those that are formed with inorganic acids such as, for example, hydrochloric or phosphoric acids, or such organic acids as acetic, oxalic, tartaric, mandelic, and the like.

[0433] Typically, vaccines are administered in a manner compatible with the dosage formulation, and in such amount as will be therapeutically effective and immunogenic. The quantity to be administered depends on the subject to be treated, including the capacity of the individual's immune system to synthesize antibodies and the degree of protection desired. Precise amounts of active ingredient required to be administered depend on the judgment of the practitioner. However, suitable dosage ranges are of the order of several hundred micrograms of active ingredient per vaccination. Suitable regimes for initial administration and booster shots are also variable, but are typified by an initial administration followed by subsequent inoculations or other administrations.

[0434] The manner of application may be varied widely. Any of the conventional methods for administration of a vaccine are applicable. These are believed to include oral application within a solid physiologically acceptable base or in a physiologically acceptable dispersion, parenterally, by injection and the like. The dosage of the vaccine will depend on the route of administration and will vary according to the size and health of the subject.

[0435] In certain aspects, it will be desirable to have one administration of the vaccine. In some aspects, it will be desirable to have multiple administrations of the vaccine, e.g., 2, 3, 4, 5, 6 or more administrations. The vaccinations may be at 1, 2, 3, 4, 5, 6, 7, 8, to 5, 6, 7, 8, 9, 10, 11, 12 twelve week intervals, including all ranges there between. In some aspects, vaccinations may be at 1, 2, 3, 4, 5, 6, 7, 8, 9, 10, 11, 12 month intervals, including all ranges there between. Periodic boosters at intervals of 1-5 years may be desirable to maintain protective levels of the antibodies.

[0436] i. Carriers

[0437] A pharmaceutically acceptable carrier may include the liquid or non-liquid basis of a composition. If a composition is provided in liquid form, the carrier may be water, such as pyrogen-free water, isotonic saline or buffered (aqueous) solutions, e.g. phosphate, citrate buffered solutions. Water or a buffer, such as an aqueous buffer, may be used, containing a sodium salt, a calcium salt, and and/or a potassium salt. The sodium, calcium and/or potassium salts may occur in the form of their halogenides, e.g. chlorides, iodides, or bromides, in the form of their hydroxides, carbonates, hydrogen carbonates, or sulfates, etc. Examples of sodium salts include, but are not limited to, NaCl, NaI, NaBr, Na₂CO₃, NaHCO₃, Na₂SO₄, Na₂HPO₄, Na₂HPO₄·₂H₂O, examples of potassium salts include, but are not limited to, KCl, KI, KBr, K₂CO₃, KHCO₃, K₂SO₄, KH₂PO₄, and examples of calcium salts include, but are not limited to, CaCl₂, CaI₂, CaBr₂, CaCO₃, CaSO₄, Ca(OH)₂. Examples of further carriers may include sugars, such as, for example, lactose, glucose, trehalose and sucrose; starches, such as, for example, corn starch or potato starch; dextrose; cellulose and its derivatives, such as, for example, sodium carboxymethylcellulose, ethylcellulose, cellulose acetate; powdered tragacanth; malt; gelatin; tallow; solid glidants, such as, for example, stearic acid, magnesium stearate; calcium sulfate; vegetable oils, such as, for example, groundnut oil, cottonseed oil, sesame oil, olive oil, corn oil and oil from theobroma; polyols, such as, for example, polypropylene glycol, glycerol, sorbitol, mannitol and polyethylene glycol; alginic acid. Examples of further carriers may include colloidal silicon oxide, magnesium stearate, cellulose, and sodium lauryl sulfate. Additional suitable pharmaceutical carriers and diluents, as well as pharmaceutical necessities for their use, are described in Remington's Pharmaceutical Sciences.

[0438] ii. Adjuvants

[0439] Suitable adjuvants include all acceptable immunostimulatory compounds, such as cytokines, toxins, or synthetic compositions. A number of adjuvants may be used to enhance an antibody response. Adjuvants include, but are not limited to, oil-in-water emulsions, water-in-oil emulsions, mineral salts, polynucleotides, and natural substances. Specific adjuvants that may be used include Freund's adjuvant, oil such as MONTANIDE® ISA51, IL1, IL2, IL3, IL4, IL5, IL6, IL7, IL8, IL9, IL10, IL12, alpha-interferon, PTNGg, GM-CSF, GMCSP, BCG, LT-a, aluminum salts, such as aluminum hydroxide or other aluminum compound, MDP compounds, such as thur-MDP and nor-MDP, CGP (MTP-PE), lipid A, monophosphoryl lipid A (MPL), lipopeptides (e.g., Pam3Cys). RIBI, which contains three components extracted from bacteria, MPL, trehalose dimycolate (TDM), and cell wall skeleton (CWS) in a 2% squalene/Tween 80 emulsion. MHC antigens may even be used.

[0440] Various methods of achieving adjuvant affect for the vaccine includes use of agents such as aluminum hydroxide or phosphate (alum), commonly used as about 0.05 to about 0.1% solution in phosphate buffered saline, admixture with synthetic polymers of sugars (CARBOPOL®) used as an about 0.25% solution, aggregation of the protein in the vaccine by heat treatment with temperatures ranging between about 70° to about 101° C. for a 30-second to 2-minute period, respectively. Aggregation by reactivating with pepsin-treated (Fab) antibodies to albumin; mixture with bacterial cells (e.g., C. parvum), endotoxins or lipopolysaccharide components of Gram-negative bacteria; emulsion in physiologically acceptable oil vehicles (e.g., mannide mono-oleate (Aracel A)); or emulsion with a 20% solution of a perfluorocarbon (FLUOSOL-DA®) used as a block substitute may also be employed to produce an adjuvant effect.

[0441] In addition to adjuvants, it may be desirable to co-administer biologic response modifiers (BRM) to enhance immune responses. BRMs have been shown to upregulate T cell immunity or downregulate suppresser cell activity. Such BRMs include, but are not limited to, Cimetidine (CIM; 1200 mg/d) (Smith/Kline, PA); or low-dose Cyclophosphamide (CYP; 300 mg/m²) (Johnson/Mead, NJ) and cytokines such as γ-interferon, IL-2, or IL-12 or genes encoding proteins involved in immune helper functions, such as B-7.

[0442] C. Combination Therapy

[0443] The compositions and related methods of the present disclosure, particularly administration of a RNA molecule encoding a VZV polypeptide, may also be used in combination with the administration of traditional therapies. These include, but are not limited to, the administration of antiviral therapies such as acyclovir, valacyclovir, and famciclovir, or various combinations of antivirals. Also included are the administration of one or more therapies to treat one or more symptoms of VZV infection, including, but not limited to, steroids including corticosteroids, anti-inflammatories including acetaminophen or ibuprofen, pain-relief agents, creams or lotions to relieve itching, cool compresses, or various combinations thereof.

[0444] In one aspect, it is contemplated that a vaccine and/or therapy is used in conjunction with antiviral treatment. Alternatively, the therapy may precede or follow the other agent treatment by intervals ranging from minutes to weeks. In aspects where the other agents and/or vaccines are administered separately, one would generally ensure that a significant period of time did not expire between the time of each delivery, such that the agent and immunogenic composition would still be able to exert an advantageously combined effect on the subject. In such aspects, it is contemplated that one may administer both modalities within about 12-24 h of each other or within about 6-12 h of each other. In some situations, it may be desirable to extend the time period for administration significantly, where several days (2, 3, 4, 5, 6 or 7) to several weeks (1, 2, 3, 4, 5, 6, 7 or 8) lapse between the respective administrations.

[0445] Various combinations may be employed, for example antiviral therapy “A” and immunogenic polypeptide given as part of an immune therapy regime “B”:

| | | | | | | | |
|---|---|---|---|---|---|---|---|
| A/B/A | B/A/B | B/B/A | A/A/B | A/B/B | B/A/A | A/B/B/B | B/A/B/B |
| B/B/B/A | B/B/A/B | A/A/B/B | A/B/A/B | A/B/B/A | B/B/A/A | | |
| B/A/B/A | B/A/A/B | A/A/A/B | B/A/A/A | A/B/A/A | A/A/B/A | | |

[0446] Administration of the immunogenic compositions of the present disclosure to a patient/subject will follow general protocols for the administration of such compounds, taking into account the toxicity, if any, of the VZV RNA vaccine composition, or other compositions described herein. It is expected that the treatment cycles would be repeated as necessary. It also is contemplated that various standard therapies, such as hydration, may be applied in combination with the described therapy.

[0447] D. Administration

[0448] Administration of the compositions described herein may be carried out via any of the accepted modes of administration of agents for serving similar utilities. In some aspects, a pharmaceutical composition described herein may be administered intravenously, intraarterially, subcutaneously, intradermally or intramuscularly. In specific aspects, the VZV RNA molecules and/or RNA-LNP compositions are administered intramuscularly. In certain aspects, the pharmaceutical composition is formulated for local administration or systemic administration. Systemic administration may include enteral administration, which involves absorption through the gastrointestinal tract, or parenteral administration. As used herein, “parenteral administration” refers to the administration in any manner other than through the gastrointestinal tract, such as by intravenous injection. In one aspect, the pharmaceutical composition is formulated for intramuscular administration. In another aspect, the pharmaceutical composition is formulated for systemic administration, e.g., for intravenous administration.

[0449] Pharmaceutical compositions may be formulated into preparations in solid, semi-solid, liquid, lyophilized, frozen, or gaseous forms, such as tablets, capsules, powders, granules, ointments, solutions, suspensions, suppositories, injections, inhalants, gels, microspheres, and aerosols. Typical routes of administering such pharmaceutical compositions include, without limitation, oral, topical, transdermal, inhalation, parenteral, sublingual, buccal, rectal, vaginal, and intranasal. The term parenteral as used herein includes subcutaneous injections, intravenous, intramuscular, intradermal, intrasternal injection, or infusion techniques. Pharmaceutical compositions described herein are formulated so as to allow the active ingredients contained therein to be bioavailable upon administration of the composition to a patient. Compositions that will be administered to a subject or patient take the form of one or more dosage units, where for example, a tablet may be a single dosage unit, and a container of a compound in aerosol form may hold a plurality of dosage units. The composition to be administered will, in any event, contain a therapeutically and/or prophylactically effective amount of a compound within the scope of this disclosure, or a pharmaceutically acceptable salt thereof, for treatment of a disease or condition of interest in accordance with the teachings described herein.

[0450] A pharmaceutical composition within the scope of this disclosure may be in the form of a solid or liquid and may be frozen or lyophilized. In one aspect, the carrier(s) are particulate, so that the compositions are, for example, in tablet or powder form. The carrier(s) may be liquid, with the compositions being, for example, an oral syrup, injectable liquid, or an aerosol, which is useful in, for example, inhalatory administration. In some aspects, when intended for oral administration, the pharmaceutical composition is in either solid or liquid form, where semi-solid, semi-liquid, suspension, and gel forms are included within the forms considered herein as either solid or liquid. As a solid composition for oral administration, the pharmaceutical composition may be formulated into a powder, granule, compressed tablet, pill, capsule, chewing gum, wafer or the like form. Such a solid composition will typically contain one or more inert diluents or edible carriers. In addition, one or more of the following may be present or exclude: binders such as carboxymethylcellulose, ethyl cellulose, microcrystalline cellulose, gum tragacanth, or gelatin; excipients such as starch, lactose, or dextrins; disintegrating agents such as alginic acid, sodium alginate, PRIMOJEL®, corn starch and the like; lubricants such as magnesium stearate or STEROTEX®; glidants such as colloidal silicon dioxide; sweetening agents such as sucrose or saccharin; a flavoring agent such as peppermint, methyl salicylate, or orange flavoring; and a coloring agent. When the pharmaceutical composition is in the form of a capsule, for example, a gelatin capsule, it may contain, in addition to materials of the above type, a liquid carrier such as polyethylene glycol or oil. The pharmaceutical composition may be in the form of a liquid, for example, an elixir, syrup, solution, emulsion or suspension. The liquid may be for oral administration or for delivery by injection, as two examples. In some aspects, when intended for oral administration, compositions contain, in addition to the present compounds, one or more of a sweetening agent, preservatives, dye/colorant, and flavor enhancer. In a composition intended to be administered by injection, one or more of a surfactant, preservative, wetting agent, dispersing agent, suspending agent, buffer, stabilizer, and isotonic agent may be included or excluded.

[0451] A liquid pharmaceutical composition, whether they be solutions, suspensions, or other like form, may include or exclude one or more of the following adjuvants: sterile diluents such as water for injection, saline solution, e.g., physiological saline, Ringer's solution, isotonic sodium chloride, fixed oils such as synthetic mono or diglycerides which may serve as the solvent or suspending medium, polyethylene glycols, glycerin, propylene glycol or other solvents; antibacterial agents such as benzyl alcohol or methyl paraben; antioxidants such as ascorbic acid or sodium bisulfite; chelating agents such as ethylenediaminetetraacetic acid; buffers such as acetates, citrates, or phosphates; and agents for the adjustment of tonicity such as sodium chloride or dextrose; agents to act as cryoprotectants such as sucrose or trehalose. The parenteral preparation may be enclosed in ampoules, disposable syringes, or multiple dose vials made of glass or plastic. In one aspect, physiological saline is the adjuvant. In one aspect, an injectable pharmaceutical composition is sterile. A liquid pharmaceutical composition intended for either parenteral or oral administration should contain an amount of a compound such that a suitable dosage will be obtained.

[0452] The pharmaceutical compositions may be prepared by methodology well known in the pharmaceutical art. For example, a pharmaceutical composition intended to be administered by injection may be prepared by combining the nucleic acid or polypeptide with sterile, distilled water or other carrier so as to form a solution. A surfactant may be added to facilitate the formation of a homogeneous solution or suspension. Surfactants are compounds that non-covalently interact with a compound consistent with the teachings herein so as to facilitate dissolution or homogeneous suspension of the compound in the aqueous delivery system.

[0453] The pharmaceutical compositions according to the present disclosure, or their pharmaceutically acceptable salts, are generally applied in a “therapeutically effective amount” or a “prophylactically effective amount” and in “a pharmaceutically acceptable preparation.” The term “pharmaceutically acceptable” refers to the non-toxicity of a material which does not interact with the action of the active component of the pharmaceutical composition. The terms “therapeutically effective amount” and “prophylactically effective amount” refer to the amount which achieves a desired reaction or a desired effect alone or together with further doses. In the case of the treatment of a particular disease, in one aspect, the desired reaction relates to inhibition of the course of the disease. This comprises slowing down the progress of the disease and, in particular, interrupting or reversing the progress of the disease. The desired reaction in a treatment of a disease may also be delay of the onset or a prevention of the onset of said disease or said condition.

[0454] The compositions within the scope of the disclosure are administered in a therapeutically and/or prophylactically effective amount, which will vary depending upon a variety of factors including the activity of the specific therapeutic and/or prophylactic agent employed; the metabolic stability and length of action of the therapeutic and/or prophylactic agent; the individual parameters of the patient, including the age, body weight, general health, gender, and diet of the patient; the mode, time, and/or duration of administration; the rate of excretion; the drug combination; the severity of the particular disorder or condition; and the subject undergoing therapy. Accordingly, the doses administered of the compositions described herein may depend on various of such parameters. In the case that a reaction in a patient is insufficient with an initial dose, higher doses (or effectively higher doses achieved by a different, more localized route of administration) may be used. In some aspects, compositions (e.g., VZV RNA-LNP compositions) may be administered at dosage levels sufficient to deliver 0.0001 ng/μg/mg per kg to 100 ng/μg/mg per kg, 0.001 ng/μg/mg per kg to 0.05 ng/μg/mg per kg, 0.005 ng/μg/mg per kg to 0.05 ng/μg/mg per kg, 0.001 ng/μg/mg per kg to 0.005 ng/μg/mg per kg, 0.05 ng/μg/mg per kg to 0.5 ng/μg/mg per kg, 0.01 ng/μg/mg per kg to 50 ng/μg/mg per kg, 0.1 ng/μg/mg per kg to 40 ng/μg/mg per kg, 0.5 ng/μg/mg per kg to 30 ng/μg/mg per kg, 0.01 ng/μg/mg per kg to 10 ng/μg/mg per kg, 0.1 ng/μg/mg per kg to 10 ng/μg/mg per kg, or 1 ng/μg/mg per kg to 25 ng/μg/mg per kg, of subject body weight per day, one or more times a day, per week, per month, etc. to obtain the desired therapeutic, diagnostic, prophylactic, or imaging effect (see e.g., the range of unit doses described in International Publication No. WO2013/078199, herein incorporated by reference in its entirety). In some aspects, compositions (e.g., VZV RNA-LNP compositions) may be administered at dosage levels sufficient to deliver at least, at most, exactly, or between any two of 0.0001, 0.0002, 0.0003, 0.0004, 0.0005, 0.0006, 0.0007, 0.0008, 0.0009, 0.001, 0.002, 0.003, 0.004, 0.005, 0.006, 0.007, 0.008, 0.009, 0.01, 0.02, 0.03, 0.04, 0.05, 0.06, 0.07, 0.08, 0.09, 0.1, 0.2, 0.3, 0.4, 0.5, 0.6, 0.7, 0.8, 0.9, 1, 2, 3, 4, 5, 6, 7, 8, 9, 10, 11, 12, 13, 14, 15, 16, 17, 18, 19, 20, 21, 22, 23, 24, 25, 26, 27, 28, 29, 30, 31, 32, 33, 34, 35, 36, 37, 38, 39, 40, 41, 42, 43, 44, 45, 46, 47, 48, 49, 50, 51, 52, 53, 54, 55, 56, 57, 58, 59, 60, 61, 62, 63, 64, 65, 66, 67, 68, 69, 70, 71, 72, 73, 74, 75, 76, 77, 78, 79, 80, 81, 82, 83, 84, 85, 86, 87, 88, 89, 90, 91, 92, 93, 94, 95, 96, 97, 98, 99, or 100 ng/μg/mg per kg, of subject body weight per day, one or more times a day, per week, per month, etc. to obtain the desired therapeutic, diagnostic, prophylactic, or imaging effect.

[0455] In some aspects, compositions (e.g., VZV RNA-LNP compositions) may be administered at a total dose of or at dosage levels sufficient to deliver a total dose of at least, at most, exactly, or between any two of 0.0001, 0.0002, 0.0003, 0.0004, 0.0005, 0.0006, 0.0007, 0.0008, 0.0009, 0.001, 0.002, 0.003, 0.004, 0.005, 0.006, 0.007, 0.008, 0.009, 0.01, 0.02, 0.03, 0.04, 0.05, 0.06, 0.07, 0.08, 0.09, 0.1, 0.2, 0.3, 0.4, 0.5, 0.6, 0.7, 0.8, 0.9, 1, 2, 3, 4, 5, 6, 7, 8, 9, 10, 11, 12, 13, 14, 15, 16, 17, 18, 19, 20, 21, 22, 23, 24, 25, 26, 27, 28, 29, 30, 31, 32, 33, 34, 35, 36, 37, 38, 39, 40, 41, 42, 43, 44, 45, 46, 47, 48, 49, 50, 51, 52, 53, 54, 55, 56, 57, 58, 59, 60, 61, 62, 63, 64, 65, 66, 67, 68, 69, 70, 71, 72, 73, 74, 75, 76, 77, 78, 79, 80, 81, 82, 83, 84, 85, 86, 87, 88, 89, 90, 91, 92, 93, 94, 95, 96, 97, 98, 99, or 100 ng/μg/mg per day, one or more times a day, per week, per month, etc. to obtain the desired therapeutic, diagnostic, prophylactic, or imaging effect.

[0456] In specific aspects, compositions (e.g., VZV RNA-LNP compositions) may be administered at a total dose of or at dosage levels sufficient to deliver a total dose of at least, at most, exactly, or between any two of 0.0001, 0.0002, 0.0003, 0.0004, 0.0005, 0.0006, 0.0007, 0.0008, 0.0009, 0.001, 0.002, 0.003, 0.004, 0.005, 0.006, 0.007, 0.008, 0.009, 0.01, 0.02, 0.03, 0.04, 0.05, 0.06, 0.07, 0.08, 0.09, 0.1, 0.2, 0.3, 0.4, 0.5, 0.6, 0.7, 0.8, 0.9, 1, 2, 3, 4, 5, 6, 7, 8, 9, 10, 11, 12, 13, 14, 15, 16, 17, 18, 19, 20, 21, 22, 23, 24, 25, 26, 27, 28, 29, 30, 31, 32, 33, 34, 35, 36, 37, 38, 39, 40, 41, 42, 43, 44, 45, 46, 47, 48, 49, 50, 51, 52, 53, 54, 55, 56, 57, 58, 59, 60, 61, 62, 63, 64, 65, 66, 67, 68, 69, 70, 71, 72, 73, 74, 75, 76, 77, 78, 79, 80, 81, 82, 83, 84, 85, 86, 87, 88, 89, 90, 91, 92, 93, 94, 95, 96, 97, 98, 99, or 100 mg/mL VZV RNA encapsulated in LNP.

[0457] In exemplary aspects, compositions (e.g., VZV RNA-LNP compositions) may be administered at dose levels of at least, at most, exactly, or between any two of 0.01, 0.15, 0.30, 0.45, 0.60, 0.75, or 0.90 mg/mL VZV RNA encapsulated in LNP. In exemplary aspects, compositions (e.g., VZV RNA-LNP compositions) may be administered at dose levels of at least, at most, exactly, or between any two of 0.01, 0.15, 0.30, 0.45, 0.60, 0.75, or 0.90 mg VZV RNA encapsulated in LNP.

[0458] In specific aspects, compositions (e.g., VZV RNA-LNP compositions) may be administered at a total dose of or at dosage levels sufficient to deliver a total dose of at least, at most, exactly, or between any two of 0.0001, 0.0002, 0.0003, 0.0004, 0.0005, 0.0006, 0.0007, 0.0008, 0.0009, 0.001, 0.002, 0.003, 0.004, 0.005, 0.006, 0.007, 0.008, 0.009, 0.01, 0.02, 0.03, 0.04, 0.05, 0.06, 0.07, 0.08, 0.09, 0.1, 0.2, 0.3, 0.4, 0.5, 0.6, 0.7, 0.8, 0.9, 1, 2, 3, 4, 5, 6, 7, 8, 9, 10, 11, 12, 13, 14, 15, 16, 17, 18, 19, 20, 21, 22, 23, 24, 25, 26, 27, 28, 29, 30, 31, 32, 33, 34, 35, 36, 37, 38, 39, 40, 41, 42, 43, 44, 45, 46, 47, 48, 49, 50, 51, 52, 53, 54, 55, 56, 57, 58, 59, 60, 61, 62, 63, 64, 65, 66, 67, 68, 69, 70, 71, 72, 73, 74, 75, 76, 77, 78, 79, 80, 81, 82, 83, 84, 85, 86, 87, 88, 89, 90, 91, 92, 93, 94, 95, 96, 97, 98, 99, or 100 μg/mL VZV RNA encapsulated in LNP.

[0459] In exemplary aspects, compositions (e.g., VZV RNA-LNP compositions) may be administered at dose levels of at least, at most, exactly, or between any two of 1, 15, 30, 45, 60, 75, 90, 100 or higher μg/mL VZV RNA encapsulated in LNP. In exemplary aspects, compositions (e.g., VZV RNA-LNP compositions) may be administered at dose levels of at least, at most, exactly, or between any two of 1, 15, 30, 45, 60, 75, 90, 100 or higher μg VZV RNA encapsulated in LNP.

[0460] The desired dosage may be delivered multiple times a day (e.g., 1, 2, 3, 4, 5, or more times a day), every other day, every third day, every week, every two weeks, every three weeks, every four weeks, every 2 months, every three months, every 6 months, etc. In certain aspects, the desired dosage may be delivered using a single-dose administration. In certain aspects, the desired dosage may be delivered using multiple administrations (e.g., two, three, four, five, six, seven, eight, nine, ten, eleven, twelve, thirteen, fourteen, or more administrations). When multiple administrations are employed, split dosing regimens may be used. The time of administration between the initial administration of the composition and a subsequent administration of the composition may be, but is not limited to, 1 minute, 2 minutes, 3 minutes, 4 minutes, 5 minutes, 6 minutes, 7 minutes, 8 minutes, 9 minutes, 10 minutes, 15 minutes, 20 minutes 35 minutes, 40 minutes, 45 minutes, 50 minutes, 55 minutes, 1 hour, 2 hours, 3 hours, 4 hours, 5 hours, 6 hours, 7 hours, 8 hours, 9 hours, 10 hours, 11 hours, 12 hours, 13 hours, 14 hours, 15 hours, 16 hours, 17 hours, 18 hours, 19 hours, 20 hours, 21 hours, 22 hours, 23 hours, 1 day, 36 hours, 2 days, 3 days, 4 days, 5 days, 6 days, 1 week, 10 days, 2 weeks, 3 weeks, 1 month, 2 months, 3 months, 4 months, 5 months, 6 months, 7 months, 8 months, 9 months, 10 months, 11 months, 1 year, 18 months, 2 years, 3 years, 4 years, 5 years, 6 years, 7 years, 8 years, 9 years, 10 years, 11 years, 12 years, 13 years, 14 years, 15 years, 16 years, 17 years, 18 years, 19 years, 20 years, 25 years, 30 years, 35 years, 40 years, 45 years, 50 years, 55 years, 60 years, 65 years, 70 years, 75 years, 80 years, 85 years, 90 years, 95 years or more than 99 years.

[0461] In some aspects, compositions (e.g., VZV RNA-LNP compositions) may be administered in a single dose. In some aspects, compositions (e.g., VZV RNA-LNP compositions) may be administered twice (e.g., Day 0 and about Day 7, Day 0 and about Day 14, Day 0 and about Day 21, Day 0 and about Day 28, Day 0 and about Day 60, Day 0 and about Day 90, Day 0 and about Day 120, Day 0 and about Day 150, Day 0 and about Day 180, Day 0 and about 1 month later, Day 0 and about 2 months later, Day 0 and about 3 months later, Day 0 and about 6 months later, Day 0 and about 9 months later, Day 0 and about 12 months later, Day 0 and about 18 months later, Day 0 and about 2 years later, Day 0 and about 5 years later, or Day 0 and about 10 years later), with each administration at a total dose of or at dosage levels sufficient to deliver a total dose of at least, at most, exactly, or between any two of 0.0001, 0.0002, 0.0003, 0.0004, 0.0005, 0.0006, 0.0007, 0.0008, 0.0009, 0.001, 0.002, 0.003, 0.004, 0.005, 0.006, 0.007, 0.008, 0.009, 0.01, 0.02, 0.03, 0.04, 0.05, 0.06, 0.07, 0.08, 0.09, 0.1, 0.2, 0.3, 0.4, 0.5, 0.6, 0.7, 0.8, 0.9, 1, 2, 3, 4, 5, 6, 7, 8, 9, 10, 11, 12, 13, 14, 15, 16, 17, 18, 19, 20, 21, 22, 23, 24, 25, 26, 27, 28, 29, 30, 31, 32, 33, 34, 35, 36, 37, 38, 39, 40, 41, 42, 43, 44, 45, 46, 47, 48, 49, 50, 51, 52, 53, 54, 55, 56, 57, 58, 59, 60, 61, 62, 63, 64, 65, 66, 67, 68, 69, 70, 71, 72, 73, 74, 75, 76, 77, 78, 79, 80, 81, 82, 83, 84, 85, 86, 87, 88, 89, 90, 91, 92, 93, 94, 95, 96, 97, 98, 99, or 100 ng/μg/mg VZV RNA encapsulated in LNP. Higher and lower dosages and frequency of administration are encompassed by the present disclosure. For example, compositions (e.g., VZV RNA-LNP compositions) may be administered three or four times. Periodic boosters at intervals of 1-5 years may be desirable to maintain protective levels of the antibodies.

[0462] In some aspects, the compositions (e.g., VZV RNA-LNP compositions) are administered to a subject as a single dose of at least, at most, exactly, or between any two of 0.0001, 0.0002, 0.0003, 0.0004, 0.0005, 0.0006, 0.0007, 0.0008, 0.0009, 0.001, 0.002, 0.003, 0.004, 0.005, 0.006, 0.007, 0.008, 0.009, 0.01, 0.02, 0.03, 0.04, 0.05, 0.06, 0.07, 0.08, 0.09, 0.1, 0.2, 0.3, 0.4, 0.5, 0.6, 0.7, 0.8, 0.9, 1, 2, 3, 4, 5, 6, 7, 8, 9, 10, 11, 12, 13, 14, 15, 16, 17, 18, 19, 20, 21, 22, 23, 24, 25, 26, 27, 28, 29, 30, 31, 32, 33, 34, 35, 36, 37, 38, 39, 40, 41, 42, 43, 44, 45, 46, 47, 48, 49, 50, 51, 52, 53, 54, 55, 56, 57, 58, 59, 60, 61, 62, 63, 64, 65, 66, 67, 68, 69, 70, 71, 72, 73, 74, 75, 76, 77, 78, 79, 80, 81, 82, 83, 84, 85, 86, 87, 88, 89, 90, 91, 92, 93, 94, 95, 96, 97, 98, 99, or 100 ng/μg/mg of VZV RNA encapsulated in LNP. In some aspects, the compositions (e.g., VZV RNA-LNP compositions) are administered the subject as a single dose of at least, at most, exactly, or between any two of 1 μg, 15 μg, 30 μg, 45 μg, 60 μg, 75 μg, 90 μg, 100 μg or higher of VZV RNA encapsulated in LNP.

[0463] In some aspects, the compositions (e.g., VZV RNA-LNP compositions) are administered to a subject as two doses of at least, at most, exactly, or between any two of 0.0001, 0.0002, 0.0003, 0.0004, 0.0005, 0.0006, 0.0007, 0.0008, 0.0009, 0.001, 0.002, 0.003, 0.004, 0.005, 0.006, 0.007, 0.008, 0.009, 0.01, 0.02, 0.03, 0.04, 0.05, 0.06, 0.07, 0.08, 0.09, 0.1, 0.2, 0.3, 0.4, 0.5, 0.6, 0.7, 0.8, 0.9, 1, 2, 3, 4, 5, 6, 7, 8, 9, 10, 11, 12, 13, 14, 15, 16, 17, 18, 19, 20, 21, 22, 23, 24, 25, 26, 27, 28, 29, 30, 31, 32, 33, 34, 35, 36, 37, 38, 39, 40, 41, 42, 43, 44, 45, 46, 47, 48, 49, 50, 51, 52, 53, 54, 55, 56, 57, 58, 59, 60, 61, 62, 63, 64, 65, 66, 67, 68, 69, 70, 71, 72, 73, 74, 75, 76, 77, 78, 79, 80, 81, 82, 83, 84, 85, 86, 87, 88, 89, 90, 91, 92, 93, 94, 95, 96, 97, 98, 99, or 100 ng/μg/mg of VZV RNA encapsulated in LNP. In some aspects, the compositions (e.g., VZV RNA-LNP compositions) are administered the subject as two doses of at least, at most, exactly, or between any two of 1 μg, 15 μg, 30 μg, 45 μg, 60 μg, 75 μg, 90 μg, 100 μg or higher of VZV RNA encapsulated in LNP.

[0464] In specific aspects, compositions (e.g., VZV RNA-LNP compositions) may be administered twice (e.g., Day 0 and Day 28, Day 0 and Day 60, Day 0 and Day 180, Day 0 and 2 months later, Day 0 and 6 months later), with each administration at a total dose of or at dosage levels sufficient to deliver a total dose of at least, at most, exactly, or between any two of 1 μg, 15 μg, 30 μg, 45 μg, 60 μg, 75 μg, 90 μg, 100 μg or higher VZV RNA encapsulated in LNP.

### IX. Methods of Use

[0465] Provided herein are compositions (e.g., pharmaceutical compositions comprising VZV RNA molecules and/or VZV RNA-LNPs), methods, kits and reagents for prevention and/or treatment of VZV in humans and other mammals.

[0466] VZV RNA compositions (e.g., VZV RNA-LNP compositions) may be used as therapeutic or prophylactic agents. They may be used in medicine to prevent and/or treat infectious disease. In exemplary aspects, the VZV RNA compositions are used to provide prophylactic protection from varicella or herpes zoster. Varicella is an acute infectious disease caused by VZV. The VZV vaccines of the present disclosure may be used to prevent and/or treat VZV (shingles or herpes zoster) and may be particularly useful for prevention and/or treatment of immunocompromised and elderly patients to prevent or to reduce the severity and/or duration of herpes zoster.

[0467] In some aspects, the VZV RNA compositions (e.g., VZV RNA-LNP compositions) of the disclosure are administered to a subject (e.g., a mammalian subject, such as a human subject), and the RNA polynucleotides are translated in vivo to produce an antigenic polypeptide.

[0468] In some aspects, the VZV RNA compositions of the disclosure may be used to prime immune effector cells, for example, to activate peripheral blood mononuclear cells (PBMCs) ex vivo, which are then infused (re-infused) into a subject.

[0469] In some aspects, after administration of a VZV RNA molecule described herein, e.g., formulated as RNA-LNPs, at least a portion of the RNA is delivered to a target cell. In some aspects, at least a portion of the RNA is delivered to the cytosol of the target cell. In some aspects, the RNA is translated by the target cell to produce the polypeptide or protein it encodes. In some aspects, the target cell is a spleen cell. In some aspects, the target cell is an antigen presenting cell such as a professional antigen presenting cell in the spleen. In some aspects, the target cell is a dendritic cell or macrophage. RNA molecules such as RNA-LNPs described herein may be used for delivering RNA to such target cell. Accordingly, the present disclosure also relates to a method for delivering RNA to a target cell in a subject comprising the administration of the RNA-particles described herein to the subject.

[0470] In some aspects, the RNA is delivered to the cytosol of the target cell. In some aspects, the RNA is translated by the target cell to produce the polypeptide or protein encoded by the RNA. “Encoding” refers to the inherent property of specific sequences of nucleotides in a polynucleotide, such as a gene, a cDNA, or an mRNA, to serve as templates for synthesis of other polymers and macromolecules in biological processes having either a defined sequence of nucleotides (e.g., rRNA, tRNA and mRNA) or a defined sequence of amino acids and the biological properties resulting therefrom. Thus, a gene encodes a protein if transcription and translation of mRNA corresponding to that gene produces the protein in a cell or other biological system. Both the coding strand, the nucleotide sequence of which is identical to the mRNA sequence and is usually provided in sequence listings, and the non-coding strand, used as the template for transcription of a gene or cDNA, may be referred to as encoding the protein or other product of that gene or cDNA.

[0471] In some aspects, nucleic acid compositions described herein, e.g., compositions comprising a VZV RNA-LNP are characterized by (e.g., when administered to a subject) sustained expression of an encoded polypeptide. For example, in some aspects, such compositions are characterized in that, when administered to a human, they achieve detectable polypeptide expression in a biological sample (e.g., serum) from such human and, in some aspects, such expression persists for a period of time that is at least at least 36 hours or longer, including, e.g., at least 48 hours, at least 60 hours, at least 72 hours, at least 96 hours, at least 120 hours, at least 148 hours, or longer.

[0472] In some aspects, the disclosure relates to a method of inducing an immune response against VZV in a subject. The method includes administering to the subject an effective amount of an RNA molecule, RNA-LNP and/or composition as described herein.

[0473] In another aspect, the disclosure relates to a method of vaccinating a subject. The method includes administering to the subject in need thereof an effective amount of an RNA molecule, RNA-LNP and/or composition described herein.

[0474] In another aspect, the disclosure relates to a method of treating or preventing an infectious disease. The method includes administering to the subject an effective amount of an RNA molecule RNA-LNP and/or composition as described herein.

[0475] In another aspect, the disclosure relates to a method of treating or preventing or reducing the severity of a VZV infection and/or illness caused by VZV. The method includes administering to the subject an effective amount of an RNA molecule, RNA-LNP and/or composition as described herein.

[0476] In another aspect, the disclosure relates to a method of treating or preventing or reducing the severity of an infectious disease in a subject by, for example, inducing an immune response to an infectious disease in the subject. In some aspects, the method includes administering a priming composition that includes an effective amount of an RNA molecule, RNA-LNP and/or composition described herein, and administering a booster composition including an effective amount of an RNA molecule, RNA-LNP and/or composition. In some aspects, the composition elicits an immune response including an antibody response. In some aspects, the composition elicits an immune response including a T cell response.

[0477] In another aspect, the disclosure relates to a method of treating or preventing or reducing the severity of a VZV infection and/or illness caused by VZV in a subject by, for example, inducing an immune response to VZV in the subject. In some aspects, the method includes administering a priming composition that includes an effective amount of an RNA molecule, RNA-LNP and/or composition described herein, and administering a booster composition including an effective amount of an RNA molecule RNA-LNP and/or composition as described herein. In some aspects, the composition elicits an immune response including an antibody response. In some aspects, the composition elicits an immune response including a T cell response.

[0478] The methods disclosed herein may involve administering to the subject a VZV RNA-LNP composition comprising at least one VZV RNA molecule having an open reading frame encoding at least one VZV antigenic polypeptide, thereby inducing in the subject an immune response specific to VZV antigenic polypeptide, wherein anti-antigenic polypeptide antibody titer in the subject is increased following vaccination relative to anti-antigenic polypeptide antibody titer in a subject vaccinated with a prophylactically effective dose (e.g., a therapeutically effective dose that prevents infection with the virus at a clinically acceptable level) of a traditional vaccine against the VZV. An “anti-antigenic polypeptide antibody” is a serum antibody the binds specifically to the antigenic polypeptide. In some aspects, the anti-antigenic polypeptide antibody titer in the subject is increased at least, at most, between any two of, or exactly 1, 2, 3, 4, 5, 6, 7, 8, 9, or 10 log following administration of the VZV RNA-LNP composition relative to anti-antigenic polypeptide antibody titer in a subject administered a prophylactically effective dose of a traditional composition against VZV.

[0479] The methods disclosed herein may involve administering to the subject a VZV RNA-LNP composition comprising at least one VZV RNA molecule having an open reading frame encoding at least one VZV antigenic polypeptide, thereby inducing in the subject an immune response specific to VZV antigenic polypeptide, wherein the immune response in the subject is equivalent to an immune response in a subject administered with a traditional composition against the VZV at least, at most, in between any two of, or exactly 2, 4, 6, 8, 10, 12, 14, 16, 18, 20, 22, 24, 26, 28, 30, 32, 34, 36, 38, 40, 42, 44, 46, 48, 50, 52, 54, 56, 58, 60, 62, 64, 66, 68, 70, 72, 74, 76, 78, 80, 82, 84, 86, 88, 90, 92, 94, 96, 98, or 100 times the dosage level relative to the RNA composition.

[0480] In some aspects, the RNA molecule, RNA-LNP and/or composition is used as a vaccine. In some aspects, the RNA molecule, RNA-LNP and/or composition may be used in various therapeutic or prophylactic methods for preventing, treating or ameliorating of herpes zoster or shingles, or a disorder related to herpes zoster or shingles.

[0481] In some aspects, the RNA molecule, RNA-LNP and/or composition may be used in various therapeutic or prophylactic methods for preventing, treating or ameliorating of post herpetic neuralgia.

[0482] VZV RNA compositions may be administered prophylactically or therapeutically to healthy subjects or early in infection during the incubation phase or during active infection after onset of symptoms. In some aspects, the subject is immunocompetent.

[0483] In some aspects, the subject is immunocompromised.

[0484] In some aspects, the RNA molecule, RNA-LNP and/or composition is administered in a single dose. In some aspects, a second, third or fourth dose may be given. In some aspects, the RNA molecule, RNA-LNP and/or composition is administered in multiple doses.

[0485] In some aspects, the RNA molecule, RNA-LNP and/or composition is administered intramuscularly (IM) or intradermally (ID).

[0486] The present disclosure further provides a kit comprising the RNA molecule, RNA-LNP, and/or composition.

[0487] In some aspects, the RNA molecule, RNA-LNP and/or composition described herein is administered to a subject that is less than about 1 years old, or about 1 years old to about 10 years old, or about 10 years old to about 20 years old, or about 20 years old to about 50 years old, or about 60 years old to about 70 years old, or older.

[0488] In some aspects the subject is at least, at most, exactly, or between any two of less than 1 year of age, greater than 1 year of age, greater than 5 years of age, greater than 10 years of age, greater than 20 years of age, greater than 30 years of age, greater than 40 years of age, greater than 50 years of age, greater than 60 years of age, greater than 70 years of age, or older. In some aspects, the subject is greater than 50 years of age.

[0489] In some aspects the subject is at least, at most, exactly, or between any two of about 1 year of age or older, about 5 years of age or older, about 10 years of age or older, about 20 years of age or older, about 30 years of age or older, about 40 years of age or older, about 50 years of age or older, about 60 years of age or older, about 70 years of age or older, or older. In some aspects, the subject may be about 50 years of age or older.

[0490] In some aspects the subject is at least, at most, exactly, or between any two of 1 year of age or older, 5 years of age or older, 10 years of age or older, 20 years of age or older, 30 years of age or older, 40 years of age or older, 50 years of age or older, 60 years of age or older, 70 years of age or older, or older. In some aspects the subject may be 50 years of age or older.

### X. Clinical Studies

[0491] The VZV RNA-LNP vaccines of the present disclosure comprise nucleoside-modified mRNA encoding glycoprotein E (gE) from VZV (modified RNA; modRNA). The VZV RNA-LNP vaccines may comprise RNA comprising a single-stranded, 5′-capped and polyadenylated modified RNA that is translated after entering the cell. The RNA comprises an open reading frame (ORF) that encodes variations of the VZV gE. For example, the RNA molecule may comprise gE_WT CO2 (RNA encodes the full length gE protein which is localized in the plasma membrane and Golgi), gE ms5 CO1 (RNA encodes a truncated gE protein in the C-terminal which is localized mainly in the plasma membrane) and/or gE ms6 CO2 (RNA encodes for the ectodomain of the gE protein which gets secreted). Further, as described herein, the RNA may comprise structural elements, such as untranslated regions (UTRs), optimized for high efficacy of the RNA. The VZV RNA-LNPs may comprise RNA as provided in Table 5 of Example 1 disclosed herein. The VZV RNA-LNPs may comprise RNA as provided in Tables 1 to 3 of Example 7 disclosed herein. The RNA may also comprise a substitution of 1-methyl-pseudouridine for uridine to decrease recognition of the vaccine RNA by innate immune sensors, such as toll-like receptors (TLRs) 7 and 8, resulting in decreased innate immune activation and increased protein translation.

[0492] The RNA molecules described herein are formulated/encapsulated into lipid nanoparticles (LNPs) to enable delivery of the RNA into host cells after intramuscular (IM) injection. The LNP formulation may comprise two functional lipids, ALC-0315 and ALC-0159, and two structural lipids, DSPC (1,2-distearoyl-sn-glycero-3-phosphocholine) and cholesterol. The potency of RNA vaccines is optimized by LNP encapsulation, which protects the RNA from degradation by extracellular RNases and facilitates delivery in the cell. After IM injection of VZV RNA-LNP vaccines, the LNPs are taken up by the cells, and the RNA is released into the cytosol. In the cytosol, the RNA is translated, and the encoded viral antigen is produced.

[0493] The Examples herein demonstrate the VZV RNA-LNP vaccines of the present disclosure are immunogenic in mice and induce both humoral and cell mediated immune responses in mice.

[0494] Clinical studies of the present disclosure evaluate the safety, tolerability, and immunogenicity of VZV RNA-LNP vaccines against VZV. For example, the VZV RNA-LNPs vaccines may be indicated for active immunization for the prevention of shingles disease caused by VZV for adults (e.g., ≥45, ≥50, ≥55, ≥60, ≥70 . . . etc. years of age or 50 through 69 years of age). VZV RNA-LNP vaccines may be administered in different dose level(s), dose formulation, number of doses and dosing schedules, as described herein, including but not limited to:
[0495] As a single-dose schedule or a two-dose schedule (e.g., Day 0 and about 2 months after or Day 0 and about 6 months after)
[0496] At different dose levels (e.g., about 15 μg, about 30 μg, about 60 μg, about 90 μg, about 100 μg or higher per administration)
[0497] At different formulations (non-lyophilized and/or lyophilized)

[0498] The VZV RNA-LNPs may be presented as a liquid or lyophilized formulation. Administration of the VZV RNA-LNP vaccines may be dosed in the range of about 15 μg, about 30 μg, about 60 μg, about 90 μg, about 100 μg or higher per dose with an injection volume of about 0.25 to 1 mL (e.g., about 0.25, 0.5, 1 mL). Dilution with sterile 0.9% sodium chloride (normal saline) may be required.

[0499] The objectives of VZV RNA-LNP clinical studies may include, but are not limited to:
[0500] To describe the safety and tolerability profile of VZV RNA-LNP vaccines administered at selected dose levels and schedules in participants.
[0501] To describe the immune responses elicited by SHINGRIX® and VZV RNA-LNP vaccines administered at selected dose levels and schedules in participants.

### Examples

[0502] Below are examples of specific aspects for carrying out the present disclosure. The following examples are included to demonstrate aspects of the disclosure. The examples are offered for illustrative purposes only and are not intended to limit the scope of the present disclosure in any way. It should be appreciated by those of skill in the art that the techniques disclosed in the examples which follow represent techniques discovered by the inventor to function well in the practice of the disclosure. However, those of skill in the art should, in light of the present disclosure, appreciate that many changes may be made in the specific aspects which are disclosed and still obtain a like or similar result without departing from the spirit and scope of the disclosure. Efforts have been made to ensure accuracy with respect to numbers used (e.g., amounts, temperatures, etc.), but some experimental error and deviation should, of course, be allowed for.

### Example 1. Generation of VZV RNA Constructs

[0503] RNA constructs generated herein encode VZV gE wild-type (WT) and gE variant proteins having cytoplasmic tail (CT) and/or transmembrane (TM) domain modifications. FIG. 1 and Table 4 show WT gE proteins (gE WT), variant gE proteins having cytoplasmic tail modifications (ms4, ms5, ms8, ms9, ms10, ms11, and ms12), and variant gE proteins having TM modifications (ms3 and ms6).

TABLE 4
VZV gE proteins and description

| VZV Protein | VZV Protein Description |
|---|---|
| gE WT | Full length WT VZV gE (623aa) |
| SEQ ID NO: 1 | |
| ms3 | VZV gE with deletion of aa 547-623 (partial TM and full CT deletion) |
| SEQ ID NO: 2 | (546aa), protein component of SHINGRIX ®, *SECRETED |
| ms4 | Full length VZV gE with substitution Y582A in YAGL (aa 582-585) |
| SEQ ID NO: 3 | endocytosis recycling signal to prevent gE endocytosis (623aa) |
| ms5 | VZV gE with deletion of aa 582-623 (partial TM deletion) (581 aa) |
| SEQ ID NO: 4 | |
| ms6 | VZV gE with deletion of aa 539-623 (full TM and CT deletion) (538 |
| SEQ ID NO: 5 | aa), *SECRETED |
| ms8 | VZV gE with deletion of the acidic domain (aa 588-602) in the CT (608 |
| SEQ ID NO: 6 | aa) |
| ms9 | VZV gE with substitution Y569A in AYRV (aa 568-571) domain that |
| SEQ ID NO: 7 | targets gE to the trans-Golgi network and deletion of the acidic domain |
| | aa 588-602 in the CT (608aa) |
| ms10 | VZV gE with substitution Y569A and deleted aa 574-623 (partial CT |
| SEQ ID NO: 8 | deletion) (573 aa) |
| ms11 | Full length VZV gE with substitutions Y569A (TGN) and Y582A (623 |
| SEQ ID NO: 9 | aa) |
| ms12 | VZV gE with substitution Y569A and deletion of aa 582-623 (partial |
| SEQ ID NO: 10 | TM deletion) (581 aa) |

[0504] DNA sequences encoding VZV proteins were prepared and utilized for in vitro transcription reactions to generate RNA. In vitro transcription of RNA is known in the art and is described herein. DNA templates were cloned into a plasmid vector with backbone sequence elements (T7 promoter, 5′ and 3′ UTR, poly-A tail for improved RNA stability and translational efficiency. The DNA was purified, spectrophotometrically quantified and in vitro-transcribed by T7 RNA polymerase in the presence of a trinucleotide cap1 analogue ((m₂^{7,3′-O})Gppp(m^{2′-O})ApG) (TriLink) and with N1-methylpseudouridine (φ) replacing uridine (modified RNA; modRNA).

[0505] The VZV RNA was generated from codon-optimized (CO) DNA for stabilization and superior protein expression. As used herein, CO1 indicates about 58% G/C content, CO2 indicates about 66% G/C content, and CO3 indicates about 62% G/C content. Table 5 shows RNA constructs of the present disclosure, and corresponding sequences, comprising a 5′ UTR, an open reading frame encoding a varicella-zoster virus (VZV) polypeptide, a 3′ UTR and a poly-A tail.

TABLE 5
VZV gE RNA constructs/molecules

| | | | | | VZV gE |
|---|---|---|---|---|---|
| RNA | 5′ UTR | VZV [ORF] | 3′ UTR | Poly-A tail* | Protein/DNA |
| Construct | SEQ ID NO | SEQ ID NO | SEQ ID NO | SEQ ID NO | SEQ ID NO |
| gE WT | 281 or 312 | 146 | 284 or 317 | 287 or 315 | 1/12 |
| gEWT CO1 | 281 or 312 | 147 | 284 or 317 | 287 or 315 | 1/13 |
| gEWT CO2 | 281 or 312 | 148 | 284 or 317 | 287 or 315 | 1/14 |
| ms3 CO1 | 281 or 312 | 149 | 284 or 317 | 287 or 315 | 2/15 |
| ms3 CO2 | 281 or 312 | 150 | 284 or 317 | 287 or 315 | 2/16 |
| ms4 CO1 | 281 or 312 | 151 | 284 or 317 | 287 or 315 | 3/17 |
| ms4 CO2 | 281 or 312 | 152 | 284 or 317 | 287 or 315 | 3/18 |
| ms5 CO1 | 281 or 312 | 153 | 284 or 317 | 287 or 315 | 4/19 |
| ms5 CO2 | 281 or 312 | 154 | 284 or 317 | 287 or 315 | 4/20 |
| ms5 CO2 v2 | 281 or 312 | 155 | 284 or 317 | 287 or 315 | 4/21 |
| ms6 CO1 | 281 or 312 | 156 | 284 or 317 | 287 or 315 | 5/22 |
| ms6 CO2 | 281 or 312 | 157 | 284 or 317 | 287 or 315 | 5/23 |
| ms8 CO1 | 281 or 312 | 158 | 284 or 317 | 287 or 315 | 6/24 |
| ms9 CO1 | 281 or 312 | 159 | 284 or 317 | 287 or 315 | 7/25 |
| ms9 CO2 | 281 or 312 | 160 | 284 or 317 | 287 or 315 | 7/26 |
| ms10 CO1 | 281 or 312 | 161 | 284 or 317 | 287 or 315 | 8/27 |
| ms10 CO2 | 281 or 312 | 162 | 284 or 317 | 287 or 315 | 8/28 |
| ms10 CO3 | 281 or 312 | 163 | 284 or 317 | 287 or 315 | 8/29 |
| ms11 CO1 | 281 or 312 | 164 | 284 or 317 | 287 or 315 | 9/30 |
| ms11 CO2 | 281 or 312 | 165 | 284 or 317 | 287 or 315 | 9/31 |
| ms12 CO1 | 281 or 312 | 166 | 284 or 317 | 287 or 315 | 10/32 |
| ms12 CO2 | 281 or 312 | 167 | 284 or 317 | 287 or 315 | 10/33 |
| gE_P1_IRES_CA | 281 or 312 | 168 | 284 or 317 | 287 or 315 | 11/34 |
| gE_P2 | 281 or 312 | 169 | 284 or 317 | 287 or 315 | 1/35 |
| gE_P3 | 281 or 312 | 170 | 284 or 317 | 287 or 315 | 1/36 |
| gE_P4 | 281 or 312 | 171 | 284 or 317 | 287 or 315 | 1/37 |
| gE_P6 | 281 or 312 | 172 | 284 or 317 | 287 or 315 | 1/38 |
| gE_P7 | 281 or 312 | 173 | 284 or 317 | 287 or 315 | 1/39 |
| gE EB1 | 281 or 312 | 174 | 284 or 317 | 287 or 315 | 1/40 |
| gE MM_1 to | 281 or 312 | 175 to 238 | 284 or 317 | 287 or 315 | 1/41 to 104 |
| gE MM_64 | | | | | |
| gE FO_D15_1_EB | 281 or 312 | 239 | 284 or 317 | 287 or 315 | 1/105 |
| gE FO_D15_1 to | 281 or 312 | 240 to 254 | 284 or 317 | 287 or 315 | 1/106 to 120 |
| gE FO_D15_15 | | | | | |
| gE FO_D13_1 to | 281 or 312 | 255 to 267 | 284 or 317 | 287 or 315 | 1/121 to 133 |
| gE FO_D13_13 | | | | | |
| gE FO_D12_1 to | 281 or 312 | 268 to 279 | 284 or 317 | 287 or 315 | 1/134 to 145 |
| gE FO_D12_12 | | | | | |

*Poly-A tail length may contain +2/−2 A or +1/−1 A.

[0506] VZV RNA constructs/molecules and RNA-LNPs evaluated in in vitro and in vivo experiments described herein in the Examples comprise modified RNA (modRNA) comprising an RNA sequence having all uridines replaced by N1-methylpseudouridine (ψ).

### Example 2. VZV gE Expression and Subcellular Location (Vero Cells)

[0507] Expression of VZV RNA constructs were tested in transfected Vero cells, a kidney epithelial cell culture line derived from African green monkeys. Seeded Vero cells were transfected for 24 hours at 37° C., 5% CO₂ with 10 ng, 25 ng, or 50 ng of RNA constructs (Table 5) using MESSENGERMAX™ in accordance with the manufacturer's instructions. Cells were washed three times with PBS+Ca/Mg, and fixed in 4% paraformaldehyde (PFA) for 20 minutes at 25° C. Cells were washed twice with 3% bovine serum albumin (BSA) in PBS+Ca/Mg. Primary and secondary staining antibodies were diluted in 0.1% saponin in goat serum. Cells were stained with a 1:1000 dilution of primary antibody for 1 hour at 37° C., washed three times with PBS+Ca/Mg, and incubated with secondary antibody (1:500) and CELLMASK™ (1:140,000) for 45 minutes at 37° C. Cells were then stained with Dapi (1:15,000-1:20,000) for 15 minutes at 25° C., and washed three times with PBS+Ca/Mg. Cells were analyzed for VZV gE expression and subcellular localization using an Opera PHENIX® Plus High-Content Screening System at 10× or 63× magnification.

[0508] Imaging analyses reveal an RNA dose-dependent increase in the percentage of VZV gE⁺ transfected Vero cells, with almost 100% of cells expressing VZV gE at the 50 ng dose among cytoplasmic tail mutants (FIG. 2), and about 80% of cells expressing VZV gE at the 50 ng dose among the secreted mutants (FIG. 3). Since the secreted mutants are mainly transported outside of the cell, lower levels are detected inside.

[0509] The mean fluorescence intensity (MFI) of each transfected RNA construct reveals a dose-dependent increase in VZV gE expression among cytoplasmic tail mutants (FIG. 4) and secreted mutants (FIG. 5), as well as a positive correlation between higher G/C content (CO2) and higher VZV gE expression levels among cytoplasmic tail mutants (FIG. 4).

[0510] Imaging analyses reveals the subcellular localization of VZV gE in Vero cells transfected with the various RNA constructs. Localization of VZV gE in gE_WT-transfected cells occurred within cellular membranes and the trans-Golgi network (TGN; FIG. 6, 63× magnification; FIG. 10, 10× magnification). Cytoplasmic tail mutants (ms4, ms5, ms8, ms9, ms10, ms11, ms12) displayed VZV gE localization preferentially within cellular membranes (FIGS. 6 to 8, 63× magnification; FIGS. 10 to 12, 10× magnification). Secreted mutants (ms3, ms6) displayed VZV gE localization within the culture supernatant (FIG. 9, 63× magnification; FIG. 13, 10× magnification).

### Example 3. Preparation of VZV gE modRNA Formulated in LNP

[0511] Purified RNA (as described in Table 5) was formulated/encapsulated into lipid nanoparticles (RNA-LNPs) using an ethanolic lipid mixture of ionizable cationic lipid and transferred into an aqueous buffer system via diafiltration to yield a lipid nanoparticle composition, as described herein. The RNA-LNP comprises a VZV RNA molecule, a cationic lipid, ((4-hydroxybutyl)azanediyl)bis(hexane-6,1-diyl)bis(2-hexyldecanoate)), a PEGylated lipid, 2-[(polyethylene glycol)-2000]-N,N-ditetradecylacetamide and two structural lipids (1,2-distearoyl-sn-glycero-3-phosphocholine (DSPC]) and cholesterol), see Table 6.

TABLE 6
Lipid formulation

| | Molecular | | |
|---|---|---|---|
| | Weight | | |
| Lipid | [Da] | Molecular Formula | Chemical name and structure |
| Cationic | 766 | C₄₈H₉₅NO₅ | (4-hydroxybutyDazanediyl)bishesane-6.1- |
| Lipid | | | diyl)bis(2-hexyldecanoate) |
| ALC-0315 | | | [chemical structure] |
| PEG-Lipid | About | C₃₀H₆₀NO(C₂H₄O)ₙOCH₃ | 2-((polyethylene alycol)-2000]-N,N- |
| ALC-0159 | 2400- | n = 45-50 | ditetradecyclacetamide |
| | 2600 | | [chemical structure] |
| DSPC | 790 | C₃₀H₈₈NO₈P | 12-Distearoyl-sn-glycero-3-phosphocholine |
| | | | [chemical structure] |
| Cholesterol | 387 | C₂₇H₄₆O | [chemical structure] |

[chemical structure]

### Example 4: In Vitro Expression (HEK 293T Cells)

[0512] In vitro expression (IVE) analyses were conducted to assess the potency of VZV RNA-LNP vaccines. RNA constructs were formulated into LNPs as previously described in Example 3, and a range of input VZV RNA-LNP quantities was transfected into human embryonic kidney (HEK) 293T cells for 24 hours at 37° C., 5% CO₂. Transfected cells were washed with DPBS, detached from plate wells using ACCUTASE®, and rinsed with cold PBS. Cells were subjected to live/dead staining, fixation, and permeabilization prior to FACS staining. Fixed and permeabilized cells were incubated with an anti-gE primary antibody (1:1000) for 45 minutes at 2-8° C., washed twice with BD PERM/WASH™ buffer and incubated with a goat anti-human kappa-PE secondary antibody (1:1000) for 30 minutes at 2-8° C. Cells were washed twice with BD PERM/WASH™ buffer, resuspended in 1×FACS buffer, and analyzed on a BD LSRII to determine the proportion of cells expressing VZV gE for each VZV RNA-LNP input. A titration curve was created whereby input RNA quantities were plotted against the percentage of gE-expressing cells to determine the EC50 of each VZV RNA-LNP vaccine.

[0513] The data in Table 7 and FIG. 14 shows positive correlation between VZV RNA-LNP vaccine potency (e.g., lower EC50) and higher MFI. Comparing the MFI of VZV RNA-LNP (293T cell) and VZV gE RNA (Vero cells; see Example 2) shows that both VZV RNA-LNP and VZV gE RNA share similar MFI trends (Table 7), wherein the potency and MFI of gE_WT CO2>gE_WT CO1>ms4 CO1>ms3 CO1.

TABLE 7
In vitro expression

| | VZV RNA-LNPs | | |
|---|---|---|---|
| | (293T cells) | | VZV RNA |
| | EC50 | | (Vero cells) |
| RNA construct | (ng/well) | MFI | MFI |
| gE_WT CO2 | 6 | 2442 | 1274 |
| gE_WT CO1 | 8 | 2057 | 1116 |
| ms4 CO1 | 15 | 1713 | 981 |
| *ms3 CO1 | 231 | 663 | 497 |

*secreted

[0514] These trends were also observed for the data in Table 8 and FIG. 15, wherein the potency and MFI of ms5 CO1>gE_WT CO2>gE_WT CO1>ms6 CO2.

TABLE 8
In vitro expression

| | VZV RNA-LNPs | | |
|---|---|---|---|
| | (293T cells) | | VZV RNA |
| | EC50 | | (Vero cells) |
| RNA construct | (ng/well) | MFI | MFI |
| ms5_CO1 | 14 | 543 | 1368 |
| gE_WT CO2 | 17 | 452 | 1274 |
| gE_WT CO1 | 22 | 337 | 1116 |
| *ms6 CO2 | 220 | 162 | 458 |

*secreted

### Example 5. Immune Responses (In Vivo Experiments)

[0515] VZV RNA-LNP vaccines were tested for their ability to induce IgG and T cell responses in Balb/c mice. 15 mice per group were immunized in accordance with the schedule and specifications in Table 9. Briefly, 15 mice per group were immunized intramuscularly (IM) on Day 0 and boosted IM on Day 28. Mice immunized with SHINGRIX® received 1, 2.5, or 5 μg, corresponding to 1/50, 1/20, and 1/10 of the human clinical dose (50 μg), respectively; mice immunized with gE_WT CO1 received 0.5 or 1 μg; mice immunized with ms3 CO1 received 0.5 μg; mice immunized with ms4 CO1 received 0.5 μg; mice immunized with gE_WT CO2 received 0.5 μg; mice immunized with lyophilized gE_WT CO1 received 0.5 or 1 μg. Saline was administered on Days 0 and 28 to a negative control group. Serum was collected from mice on Days 28 and 42 for characterization of VZV gE-binding IgG levels (LUMINEX® analyses). Spleens were harvested, and sera collected, from five mice in each group on Day 35 for cellular analyses.

TABLE 9
Administration schedule of SHINGRIX® and VZV RNA-LNPs

| | | | Dose | | Dose Vol/ | Admin | Bleed |
|---|---|---|---|---|---|---|---|
| # | Mice | Vaccine | (μg) | | Route | (Day) | (Day) |
| 1 | 15 | Saline | — | | 50 μl/IM | 0, 28 | 28, 34*, 42 |
| 2 | 15 | SHINGRIX® | 5 | μg | 50 μl/IM | 0, 28 | 28, 34*, 42 |
| 3 | 15 | SHINGRIX® | 2.5 | μg | 50 μl/IM | 0, 28 | 28, 34*, 42 |
| 4 | 15 | SHINGRIX® | 1 | μg | 50 μl/IM | 0, 28 | 28, 34*, 42 |
| 5 | 15 | gE_WT CO1 | 0.5 | μg | 50 μl/IM | 0, 28 | 28, 34*, 42 |
| 6 | 15 | gE_WT CO1 | 1 | μg | 50 μl/IM | 0, 28 | 28, 34*, 42 |
| 7 | 15 | ms3 CO1 | 0.5 | μg | 50 μl/IM | 0, 28 | 28, 34*, 42 |
| 8 | 15 | ms4 CO1 | 0.5 | μg | 50 μl/IM | 0, 28 | 28, 34*, 42 |
| 9 | 15 | gE_WT CO2 | 0.5 | μg | 50 μl/IM | 0, 28 | 28, 34*, 42 |
| 10 | 15 | gE_WT CO1 | 0.5 | μg | 50 μl/IM | 0, 28 | 28, 34*, 42 |
| | | lyophilized | | | | | |
| 11 | 15 | gE_WT CO1 | 1 | μg | 50 μl/IM | 0, 28 | 28, 34*, 42 |
| | | lyophilized | | | | | |

*Euthanize 5 mice at day 34 for spleens (T cells)

### IgG Antibodies Titers

[0516] Serum IgG levels were determined for each mouse sample using the LUMINEX® platform. Briefly, diluted sera were incubated in the dark in the presence of blocked, recombinant gE protein-bound single-plex microspheres (MAGPLEX® Microspheres, region 79) for 20±4 hours at 2-8° C., 300 rpm. A secondary antibody solution (R-phycoerythrin Conjugated AffiniPure F(ab)′2 Fragment Goat Anti-Mouse IgG F(ab)′2 Fragment Specific) was prepared at 1:250 in LXA-16 buffer. Plates were washed three times in LXA-20 (EIA-7), and secondary antibody was applied to each well of the assay plate. Plates were covered with aluminum sealers and incubated for 2 hours±15 minutes at 25° C., 300 rpm. Plates were washed three times with LXA-20 (EIA-7) buffer, and 100 ul LXA-20 was applied to each well. Plates were covered with aluminum sealers and incubated at 25° C., 300 rpm for a minimum of 4 minutes, or up to 2 hours. Plates were analyzed on a BIO-PLEX® Reader. IgG titers for Day, 28, 34 and 42 are show in Table 10 and FIGS. 17-19.

TABLE 10
Geometric Mean Titers (GMCs) on Days 28, 34 and 42

| | | | Day 28 | Day 34 | Day 42 |
|---|---|---|---|---|---|
| | Dose | | (GMC) | (GMC) | (GMC) |
| Saline | — | | 0.03 | 0.04 | 0.09 |
| SHINGRIX ® | 5 | μg | 37.74 | 547.8 | 1260.76 |
| | 2.5 | μg | 6.77 | 438.4 | 959.78 |
| | 1 | μg | 2.33 | 177.9 | 498.79 |
| gE_WT CO1 | 1 | μg | 33.78 | 572.7 | 1630.85 |
| | 0.5 | μg | 7.69 | 223.9 | 918.43 |
| ms3 CO1 | 0.5 | μg | 3.98 | 29.5 | 370.11 |
| ms4 CO1 | 0.5 | μg | 3.55 | 112.7 | 598.57 |
| gE_WT CO2 | 0.5 | μg | 12.90 | 437.9 | 524.39 |
| gE_WT CO1 Iyo | 1 | μg | 27.03 | 549.9 | 1979.67 |
| | 0.5 | μg | 7.33 | 300.4 | 1166.40 |

[0517] As shown in FIG. 16, IgG titers on Day 28 (prime only/prior to receiving the boost) reveal a dose-dependent change in geometric mean concentration (GMC) in mice receiving SHINGRIX®, gE_WT CO1, and lyophilized gE_WT CO1. The GMC of gE_WT CO1 (7.69) and gE_WT CO2 (12.90) administered at 0.5 μg (1/60 of a potential clinical dose of 30 μg) are notably higher than the GMC of SHINGRIX® (2.33) at administered at 1 μg (1/50 its human clinical dose of 50 μg) (FIG. 16). Potential clinical doses for VZV RNA-LNPs include, but are not limited to, 15 μg, 30 μg, 60 μg, 90 μg, 100 μg or higher. Accordingly, the GMC of gE_WT CO1 (33.78) administered at 1 μg (1/60 of a potential clinical dose of 60 μg) is higher than the GMC of SHINGRIX® (2.33) administered at 1 μg (1/50 its human clinical dose of 50 μg).

[0518] As shown in FIG. 17, IgG titers on Day 34 (six days after receiving the boost on Day 28) similarly reveal a dose-dependent change in GMC in mice receiving SHINGRIX®, gE_WT CO1, and lyophilized gE_WT CO1 (FIG. 17). Higher IgG levels were observed for VZV RNA-LNP vaccines compared to SHINGRIX® (in particular, GMC of 223.9 for gE_WT CO1 and 437.9 for gE_WT CO2 at 1/60 of a potential clinical dose of 30 μg vs. GMC of 177.9 for SHINGRIX® at 1/50 its human clinical dose (FIG. 17)).

[0519] A positive correlation was observed between higher G/C content and higher IgG titers when comparing gE_WT CO1 (about 58% G/C) and gE_WT CO2 (about 66% G/C), see FIGS. 16 and 17.

[0520] As shown in FIG. 18, IgG titers on Day 42 further reveal a dose-dependent change in geometric mean concentration (GMC). Higher IgG levels were observed for gE_WT CO1 (GMC of 918.43) and gE_WT CO2 (GMC of 524.39) compared to SHINGRIX® (GMC of 498.79).

[0521] FIG. 19 shows compiles the IgG levels of SHINGRIX® (1 μg) and RNA-LNP vaccines (0.5 μg) observed at Days 28 (prime only), 34 (six days after boost) and 42.

[0522] Comparable IgG titers were observed for the non-lyophilized gE_WT CO1 and lyophilized gE_WT CO1 Lyo.

### Cell-Meditated Immunity (T Cell Responses)

[0523] Splenocytes were harvested from Balb/c mice on Day 34, (34 days after immunization, 6 days after boost) to assess gE-specific T cell responses induced. An Intracellular Cytokine Staining (ICS) assay was used to detect the presence of cytokines within CD4⁺ or CD8⁺ T cells following antigen peptide stimulation. ICS assay can detect multiple cytokines, including IFN-γ, produced in both CD4⁺ and CD8⁺ T cells following antigen peptide stimulation. During the ex vivo stimulation of splenocytes, reagents to block protein secretion are added to retain the synthesized cytokine to allow their detection by intracellular staining. Following stimulation, cells are stained for surface and intracellular markers to identify T cell types (CD3⁺ cells for CD4 and CD8 T cells), activation markers (CD154/CD40L) and cytokines. CD4⁺ T cells expressing IFN-γ, IL-2, TNFα and CD40L, and CD8⁺ T cells expressing IFN-γ were assessed to evaluate gE-specific T cells.

[0524] 2×10⁶ splenocytes were stimulated with a 2 μg/mL gE peptide pool mix, a mix of 10 ng/ml phorbol myristate acetate (PMA) and 1 μg/mL ionomycin (positive control), or DMSO (negative control). BD GOLGISTOP™ and BD GOLGIPLUG™ were added to block protein secretion. Following incubation for 6 hours at 37° C., cells were stained for viability (10 min at 25° C.) and extracellular markers with directly labelled antibodies (20 min at 25° C.). Cells were fixed and permeabilized with BD CYTOFIX/CYTOPERM™ solution. Intracellular staining for cytokines (IFN-γ, IL-2, TNFα) and activation markers (CD154/CD40L) was performed in BD CYTOFIX/CYTOPERM™ solution (30 min at 25° C.). Cells were washed, resuspended in 2% FBS/PBS buffer and acquired on an LSRFORTESSA™. Data were analyzed by FlowJo 10.7.1. Results shown are background (media-DMSO) subtracted.

[0525] As shown in FIG. 20, examination of CD4⁺ IFN-γ⁺ (Th1) T cells revealed a strong, dose-dependent response in groups receiving VZV RNA-LNP vaccines (including lyophilized vaccine), and minimal response in mice receiving SHINGRIX®. As shown in FIG. 21, examination of CD8⁺ IFN-γ⁺ T cells revealed a strong, but variable, response in groups receiving VZV RNA-LNP vaccines, and an undetectable response in mice receiving SHINGRIX®.

### Example 6. Immune Responses—LAV-Experienced Mice (In Vivo Experiments)

[0526] VZV RNA-LNP vaccines were tested for their ability to induce IgG and T cell responses in C57BL/6 mice. 15 mice per group were immunized in accordance with the schedule and specification in Table 11. Briefly, 10 or 15 mice per group were primed subcutaneously (SQ) on Day 0 with a live-attenuated varicella (LAV) vaccine (VARIVAX®, Merck) using a full human dose per mouse (1350 pfu), immunized intramuscularly (IM) on Day 35 day and boosted on Day 63. The “infection” with a LAV vaccine mimics exposure to VZV that humans receive when infected with VZV as children and develop chickenpox.

[0527] Mice immunized with SHINGRIX® received 1, 2.5, or 5 μg, corresponding to 1/50, 1/20, and 1/10 of the human clinical dose, respectively; mice immunized with gE_WT CO2 received 0.5 or 1 μg VZV RNA-LNP; mice immunized with ms5 CO1 received 0.5 or 1 ug VZV RNA-LNP; mice immunized with ms6 CO2 received 0.5 or 1 ug VZV RNA-LNP; and mice immunized with lyophilized gE_WT CO2 received 0.5 or 1 ug VZV RNA-LNP. Saline was administered on Day 35 and 63 to a negative control group. Sera was collected from mice on Day 35, 63 and 76 for characterization of VZV gE-binding IgG levels (LUMINEX® analyses). Spleens were harvested on Day 48 (13 days post dose 1 for selected groups) and Day 76 for cellular analysis (T cell and B cell responses).

TABLE 11
Administration schedule of SHINGRIX® and VZV RNA-LNPs

| | | | | | | | | Spleen |
|---|---|---|---|---|---|---|---|---|
| | | | | | | | | collection |
| | | | Dose | | Dose Vol/ | Admin | Bleed | D48*/D76* |
| # | Mice | Vaccine | (μg) | | Route | (Day) | (Day) | (n = 5) |
| 1 | 15 | Saline | — | | 50 μl/IM | 0**, | 35, 48*, | Yes/Yes |
| | | | | | | 35, 63 | 63, 76* | |
| 2 | 15 | SHINGRIX® | 5 | μg | 50 μl/IM | 0**, | 35, 48*, | Yes/Yes |
| | | | | | | 35, 63 | 63, 76* | |
| 3 | 10 | SHINGRIX® | 2.5 | μg | 50 μl/IM | 0**, | 35, 63, | No/Yes |
| | | | | | | 35, 63 | 76* | |
| 4 | 15 | SHINGRIX® | 1 | μg | 50 μl/IM | 0**, | 35, 48*, | Yes/Yes |
| | | | | | | 35, 63 | 63, 76* | |
| 5 | 15 | gE_WT CO2 | 1 | μg | 50 μl/IM | 0** | 35, 48*, | Yes/Yes |
| | | | | | | 35, 63 | 63, 76* | |
| 6 | 15 | gE_WT CO2 | 0.5 | μg | 50 μl/IM | 0** | 35, 48*, | Yes/Yes |
| | | | | | | 35, 63 | 63, 76* | |
| 7 | 15 | ms5 CO1 | 1 | μg | 50 μl/IM | 0** | 35, 48*, | Yes/Yes |
| | | | | | | 35, 63 | 63, 76* | |
| 8 | 10 | ms5 CO1 | 0.5 | μg | 50 μl/IM | 0** | 35, 63, | No/No |
| | | | | | | 35, 63 | 76 | |
| 9 | 15 | ms6 CO2 | 1 | μg | 50 μl/IM | 0** | 35, 48*, | Yes/Yes |
| | | | | | | 35, 63 | 63, 76* | |
| 10 | 10 | ms6 CO2 | 0.5 | μg | 50 μl/IM | 0** | 35, 63, | No/No |
| | | | | | | 35, 63 | 76 | |
| 11 | 15 | gE_WT CO2 lyophilized | 1 | μg | 50 μl/IM | 0** | 35, 48*, | Yes/Yes |
| | | | | | | 35, 63 | 63,76* | |
| 12 | 10 | gE_WT CO2 lyophilized | 0.5 | μg | 50 μl/IM | 0** | 35, 63, | No/Yes |
| | | | | | | 35, 63 | 76 | |

* Spleen collection, Day 48: 8 groups, 40 mice; Day 76: 10 groups, 50 mice
^{**} VARIVAX® (LAV) administered at a full clinical dose (1350 pfu) SQ on Day 0 in a total volume of 0.5 mL

### IgG Antibodies Titers

[0528] Serum IgG levels were determined for each mouse sample using the LUMINEX® platform (described herein). IgG titers for Day 35, 63 (1 month post dose 1) and 76 (13 days pose dose 2) are show in Table 12 and FIGS. 22-24. Each data point in the figures is a result from an individual animal; each horizontal lines represents the geometric mean IgG concentration (μg/ml) and whiskers represent the 95% confidence interval.

TABLE 12
Geometric Mean Titers (GMCs) on Days 35, 63 and 76

| | | | | Day 35 | Day 63 | Day 76 |
|---|---|---|---|---|---|---|
| | # | Dose | | (GMC) | (GMC) | (GMC) |
| Saline | 1 | — | | 0.15 | 0.17 | 0.17 |
| SHINGRIX ® | 2 | 5 | μg | 0.11 | 101 | 1148 |
| | 3 | 2.5 | μg | 0.13 | 115 | 1649 |
| | 4 | 1 | μg | 0.3 | 94 | 887 |
| gE_WT CO2 | 5 | 1 | μg | 0.60 | 112 | 695 |
| | 6 | 0.5 | μg | 0.09 | 33 | 316 |
| ms5 CO1 | 7 | 1 | μg | 0.14 | 76 | 530 |
| | 8 | 0.5 | μg | 0.11 | 41 | 556 |
| ms6 CO2 | 9 | 1 | μg | 0.19 | 58 | 723 |
| | 10 | 0.5 | μg | 0.28 | 50 | 464 |
| gE_WT CO2 Iyo | 11 | 1 | μg | 0.03 | 69 | 917 |
| | 12 | 0.5 | μg | 0.07 | 56 | 460 |

[0529] As expected prior to immunization, FIG. 22 shows low levels of IgG titers on Day 35 after SQ prime with LAV vaccine (VARIVAX®) on Day 0. As shown in FIG. 23, IgG titers significantly increased in a dose-dependent response on Day 63 (1 month post dose 1) in LAV-experienced mice receiving VZV RNA-LNP vaccines or SHINGRIX®. FIG. 24 shows a further increase in IgG titers in a dose-dependent response on Day 76 (13 days post dose 2/boost).

[0530] The effect of lyophilization on immunogenicity was evaluated. As shown in FIG. 25, comparable IgG titers were observed for the non-lyophilized gE_WT CO2 and lyophilized gE_WT CO2 at both Day 63 (1 month post dose 1) and Day 76 (13 days post dose 2/boost).

### Cell-Meditated Immunity (T Cell and B Cell Responses)

[0531] Vaccine-induced T cell response was measured following ex vivo stimulation of splenocytes with gE peptide pool (2 μg/mL of each peptide) by ELISpot and Intracellular Cytokine Staining (ICS) assay (described herein). For ELISpot, the cytokine IFN-γ secreted by activated T cells were captured by an anti-IFN-γ antibody coated onto the polyvinylidene fluoride (PVDF) membrane of the well bottom on a microplate. The captured IFN-γ was developed into a spot by another non-competing biotinylated anti-IFN-γ secondary antibody followed by an enzymatic color reaction using streptavidin-alkaline phosphatase (ALP) conjugate and the substrate solution, nitro-blue tetrazolium and 5-bromo-4-chloro-3′-indolyphosphate (BCIP/NBT-plus) that yielded a dark purple precipitate or spot. T cell IFN-γ response was measured using Mabtech Mouse IFN-γ ELISpot PLUS kit (ALP) and expressed as spot forming cells (SFC) per million cells. The ICS assay measured IFN-γ-expressing cells within CD4⁺ and CD8⁺ T cells expressed as percentage of IFN-γ⁺ cells within CD4⁺ and CD8⁺ T cells.

[0532] Vaccine-induced B cell response was evaluated by measuring the frequencies of VZV gE-specific B cells in the spleen. Wild type gE protein ectodomain with streptag was coupled to streptavidin (SA)-fluorochromes PE and APC, both from BioLegend in the ratio of 2:1 in separate tubes for 1 hour at room temperature (RT) at 20× of desired staining concentration (10 μg/mL for each protein). Each of the SA-fluorochrome-coupled spike proteins were pooled and diluted to 1× using flow cytometry (FC) buffer (2% FBS/PBS) to generate B-cell probes to identify gE-specific B cells. Single cell suspensions of splenocytes (5×10⁶ cells per well) were first washed in PBS and stained with eFluor 506 Fixable Viability dye for 10 minutes at RT to identify live from dead cells. Following washes in FC buffer, cells were incubated with 50 μL/well of 1×B-cell probe for 30 to 45 minutes and then washed to remove unbound probes. Cells were surface stained with a cocktail of flow cytometry antibodies (CD19, IgD, IgM, IgD, All from BioLegend) to identify B cell surface phenotypes. Following washing, cells were fixed using BD Fixation buffer and suspended in FC buffer. Cells were acquired on LSR Fortessa and data analyzed by FlowJo (10.7.1). The results of gE-specific B cells were expressed as the percentage of IgG-expressing B cells.

### Day 48

[0533] Splenocytes were harvested from C57BL/6 mice on Day 48 (13 days post dose 1) to assess gE-specific cellular immune responses induced after a single vaccine dose, see Table 13 and FIGS. 26A-26D. LAV-experienced mice were immunized IM at Day 35 with SHINGRIX® or VZV RNA-LNP vaccine, and spleens collected on Day 48 (13 days post dose 1).

TABLE 13
Cellular immune responses on Day 48 (13 days post dose 1)

| | | | gE-specific | IFN-γ⁺ CD4⁺ | IFN-γ⁺ CD8⁺ | gE-specific |
|---|---|---|---|---|---|---|
| | Dose | | IFN-γ⁺cells | T cell | T cell | IgG⁺ B cells |
| Saline | — | | 12 | 0.00 | 0.00 | 0.12 |
| SHINGRIX ® | 5 | μg | 732 | 0.60 | 0.00 | 4.99 |
| | 1 | μg | 126 | 0.08 | 0.00 | 1.39 |
| gE_WT CO2 | 1 | μg | 1016 | 0.69 | 0.08 | 4.16 |
| | 0.5 | μg | 238 | 0.12 | 0.06 | 0.78 |
| ms5 CO1 | 1 | μg | 1068 | 0.47 | 0.05 | 4.14 |
| ms6 CO2 | 1 | μg | 150 | 0.09 | 0.16 | 1.85 |
| gE_WT CO2 Iyo | 1 | μg | 206 | 0.08 | 0.04 | 2.06 |

[0534] FIG. 26A shows LAV-experienced mice elicited a strong gE-specific IFN-γ (T-cell) response in a dose-dependent manner, as measured by IFN-γ ELISpot, after a single vaccine dose. As shown in FIG. 26B, ICS assay results revealed a similar strong, dose-dependent gE-specific IFN-γ⁺ CD4⁺ T cell response induced by the vaccines as demonstrated by ELISpot. FIG. 26C shows a gE-specific IFN-γ⁺ CD8⁺ T cell response was only induced by VZV RNA-LNP vaccines (gE_WT CO2, ms5 CO1, ms6 CO2, gE_WT CCO2 lyo) but not SHINGRIX®, demonstrating the unique immune response induced by VZV-RNA-LNP vaccines. Overall, at Day 48 (13 days post dose 1), the T cell response induced by gE_WT CO2 at 1 μg (1/60 of a potential clinical dose of 60 μg) was significantly higher than the T cell response induced by SHINGRIX® at 1 μg (1/50 of its human dose).

[0535] B cell response was evaluated in splenocytes by measuring the frequency of gE-specific IgG⁺ B cells by flow cytometry. As shown in FIG. 26D, the frequency of gE-specific IgG⁺ B cells revealed that the B cell response induced by the vaccines is similar to the gE-specific IFN-γ⁺ CD4⁺ T-cell response.

### Day 76

[0536] Splenocytes were harvested from C57BL/6 mice on Day 76 (13 days post dose 2/boost) to assess gE-specific cellular immune responses induced after a second/boost vaccine dose, see Table 14 and FIGS. 27A-27C. LAV-experienced mice were immunized IM at Day 35 and day 63 with SHINGRIX® or VZV RNA-LNP vaccine, and spleens collected on day 76 (13 days dost post 2/boost).

TABLE 14
Cellular immune responses on Day 76 (13 days post dose 2/boost)

| | | | IFN-γ⁺ CD4⁺ | IFN-γ⁺ CD8⁺ | gE-specific |
|---|---|---|---|---|---|
| | Dose | | T cell | T cell | IgG⁺ B cells |
| Saline | — | | 0.00 | 0.01 | 0.22 |
| SHINGRIX ® | 5 | μg | 2.24 | 0.01 | 7.38 |
| | 2.5 | μg | 1.88 | 0.01 | 7.91 |
| | 1 | μg | 0.49 | 0.00 | 16.90 |
| gE_WT CO2 | 1 | μg | 1.41 | 0.37 | 2.19 |
| | 0.5 | μg | 0.94 | 0.53 | 0.98 |
| ms5 CO1 | 1 | μg | 0.48 | 0.28 | 2.19 |
| ms6 CO2 | 1 | μg | 0.50 | 0.21 | 1.38 |
| gE_WT CO2 Iyo | 1 | μg | 0.08 | 0.31 | 1.96 |
| | 0.5 | μg | 0.67 | 0.32 | 1.71 |

[0537] FIG. 27A shows the second/boost vaccine dose significantly increased the gE-specific CD4⁺ T cell response in a dose-dependent manner, as measured by ICS assay. As shown in FIG. 27B, a robust increase in gE-specific IFN-γ⁺ CD8⁺ T-cell response was only induced by VZV RNA-LNP vaccines (gE_WT CO2, ms5 CO1, ms6 CO2, gE_WT 0002 lyo) but not SHINGRIX®, confirming the unique immune response induced by VZV-RNA-LNP vaccines. Overall, at Day 76 (13 days post dose 2/boost), the T cell response induced by gE_WT CO2 at 1 μg (1/60 of a potential clinical dose of 60 μg) was higher than the T cell response induced by SHINGRIX® at 1 μg (1/50 of its human dose).

[0538] B cell response was evaluated in splenocytes by measuring the frequency of gE-specific IgG⁺ B cells by flow cytometry and are shown in FIG. 270.

### Example 7. VZV Antigens

[0539] Sequences of the VZV anti gens/polypeptides, VZV DNA and VZV RNA of the present invention are provided in Tables 1 to 3. The sequences may comprise any stop codon, including but not limited to the stop codons provided in the Tables.

Lengthy table referenced here
US20230233671A1-20230727-T00001
Please refer to the end of the specification for access instructions.

Lengthy table referenced here
US20230233671A1-20230727-T00002
Please refer to the end of the specification for access instructions.

Lengthy table referenced here
US20230233671A1-20230727-T00003
Please refer to the end of the specification for access instructions.

The following paragraphs describe additional aspects of the disclosure:
1. An RNA molecule comprising at least one open reading frame encoding a varicella-zoster virus (VZV) polypeptide.
2. The RNA molecule of paragraph 1, wherein the VZV polypeptide is a VZV glycoprotein.
3. The RNA molecule of paragraph 2, wherein the VZV glycoprotein is selected from VZV gK, gN, gC, gB, gH, gM, gL gI and gE.
4. The RNA molecule of paragraph 3, wherein the VZV glycoprotein is VZV gE.
5. The RNA molecule of any one of paragraphs 1 to 4, wherein the VZV polypeptide is a full-length, truncated, fragment or variant thereof.
6. The RNA molecule of any one of paragraphs 1 to 5, wherein the VZV polypeptide comprises at least one mutation.
7. The RNA molecule of any one of paragraphs 1 to 6, wherein the VZV polypeptide comprises an amino acid of Table 1, including but not limited to any of SEQ ID NO: 1 to 11.
8. The RNA molecule of any one of paragraphs 1 to 7, wherein the VZV polypeptide has at least 90%, 95, 96%, 97%, 98% or 99% identity to the amino acid sequence selected from SEQ ID NO: 1 to 11.
9. The RNA molecule of any one of paragraphs 1 to 8, wherein the VZV polypeptide comprises an amino acid sequence selected from SEQ ID NO: 1 to 11.
10. The RNA molecule of any one of paragraphs 1 to 9, wherein the open reading frame is transcribed from a nucleic acid sequence of Table 2, including by not limited to any of SEQ ID NO: 12 to 145.
11. The RNA molecule of any one of paragraphs 1 to 10, wherein the open reading frame is transcribed from a nucleic acid sequence having at least 90%, 95, 96%, 97%, 98% or 99% identity to the sequence of any of SEQ ID NO: 12 to 145.
12. The RNA molecule of any one of paragraphs 1 to 11, wherein the open reading frame comprises a nucleic acid sequence of Table 3, including but not limited to any of SEQ ID NO: 146 to 279.
13. The RNA molecule of any one of paragraphs 1 to 12, wherein the open reading frame comprises a nucleic acid sequence having at least 90%, 95, 96%, 97%, 98% or 99% identity to the sequence of any of SEQ ID NO: 146 to 279.
14. The RNA molecule of any one of paragraphs 1 to 13, wherein the open reading frame comprises a nucleic acid sequence of SEQ ID NO: 146 (gE WT).
15. The RNA molecule of any one of paragraphs 1 to 14, wherein the open reading frame comprises a nucleic acid sequence of SEQ ID NO: 147 (gE WT CO1).
16. The RNA molecule of any one of paragraphs 1 to 15, wherein the open reading frame comprises a nucleic acid sequence of SEQ ID NO: 148 (gE WT CO2).
17. The RNA molecule of any one of paragraphs 1 to 16, wherein the open reading frame comprises a nucleic acid sequence of SEQ ID NO: 149 (ms3 CO1).
18. The RNA molecule of any one of paragraphs 1 to 17, wherein the open reading frame comprises a nucleic acid sequence of SEQ ID NO: 150 (ms3 CO2).
19. The RNA molecule of any one of paragraphs 1 to 18, wherein the open reading frame comprises a nucleic acid sequence of SEQ ID NO: 151 (ms4 CO1).
20. The RNA molecule of any one of paragraphs 1 to 19, wherein the open reading frame comprises a nucleic acid sequence of SEQ ID NO: 152 (ms4 CO2).
21. The RNA molecule of any one of paragraphs 1 to 20, wherein the open reading frame comprises a nucleic acid sequence of SEQ ID NO: 153 (ms5 CO1).
22. The RNA molecule of any one of paragraphs 1 to 21, wherein the open reading frame comprises a nucleic acid sequence of SEQ ID NO: 154 (ms5 CO2).
23. The RNA molecule of any one of paragraphs 1 to 22, wherein the open reading frame comprises a nucleic acid sequence of SEQ ID NO: 155 (ms5 CO2 v2).
24. The RNA molecule of any one of paragraphs 1 to 23, wherein the open reading frame comprises a nucleic acid sequence of SEQ ID NO: 156 (ms6 CO1).
25. The RNA molecule of any one of paragraphs 1 to 24, wherein the open reading frame comprises a nucleic acid sequence of SEQ ID NO: 157 (ms6 CO2).
26. The RNA molecule of any one of paragraphs 1 to 25, wherein the open reading frame comprises a nucleic acid sequence of SEQ ID NO: 158 (ms8 CO1).
27. The RNA molecule of any one of paragraphs 1 to 26, wherein the open reading frame comprises a nucleic acid sequence of SEQ ID NO: 159 (ms9 CO1).
28. The RNA molecule of any one of paragraphs 1 to 27, wherein the open reading frame comprises a nucleic acid sequence of SEQ ID NO: 160 (ms9 CO2).
29. The RNA molecule of any one of paragraphs 1 to 28, wherein the open reading frame comprises a nucleic acid sequence of SEQ ID NO: 161 (ms10 CO1).
30. The RNA molecule of any one of paragraphs 1 to 29, wherein the open reading frame comprises a nucleic acid sequence of SEQ ID NO: 162 (ms10 CO2).
31. The RNA molecule of any one of paragraphs 1 to 30, wherein the open reading frame comprises a nucleic acid sequence of SEQ ID NO: 163 (ms10 CO3).
32. The RNA molecule of any one of paragraphs 1 to 31, wherein the open reading frame comprises a nucleic acid sequence of SEQ ID NO: 164 (ms11 CO1).
33. The RNA molecule of any one of paragraphs 1 to 32, wherein the open reading frame comprises a nucleic acid sequence of SEQ ID NO: 165 (ms11 CO2).
34. The RNA molecule of any one of paragraphs 1 to 33, wherein the open reading frame comprises a nucleic acid sequence of SEQ ID NO: 166 (ms12 CO1).
35. The RNA molecule of any one of paragraphs 1 to 34, wherein the open reading frame comprises a nucleic acid sequence of SEQ ID NO: 167 (ms12 CO2).
36. The RNA molecule of any one of paragraphs 1 to 35, wherein each uridine is replaced by N1-methylpseudouridine (ψ).
37. The RNA molecule of any one of paragraphs 1 to 36, further comprising a 5′ untranslated region (5′ UTR).
38. The RNA molecule of paragraph 37, wherein the 5′ UTR comprises a sequence selected from any of SEQ ID NO: 281 and 312 to 313.
39. The RNA molecule any one of paragraphs 1 to 38, further comprising a 3′ untranslated region (3′ UTR).
40. The composition of paragraph 39, wherein the 3′ UTR comprises a sequence selected from any of SEQ ID NO: 284, 314 and 317.
41. The RNA molecule of any one of paragraphs 1 to 40, wherein the RNA molecule comprises a 5′ cap moiety.
42. The RNA molecule of paragraph 41, wherein the RNA molecule comprises a 5′ cap moiety comprising (3′OMe)-m₂^{7,3-O}Gppp (m₁^{2′-O})ApG.
43. The RNA molecule of any one of paragraphs 1 to 42, further comprising a 3′ poly-A tail.
44. The RNA molecule of paragraph 43, wherein the poly-A tail comprises a sequence selected from any of SEQ ID NO: 287 and 315 comprising +/−1 or +/−2 adenosine (A).
45. The RNA molecule of paragraph 43, wherein the poly-A tail comprises a sequence of SEQ ID NO: 287 comprising +/−1 or +/−2 adenosine (A).
46. The RNA molecule of paragraph 43, wherein the poly-A tail comprises a sequence of SEQ ID NO: 315 comprising +/−1 or +/−2 adenosine (A).
47. The RNA molecule of any one of paragraphs 1 to 46, wherein the RNA molecule comprises a 5′ UTR and 3′ UTR.
48. The RNA molecule of any one of paragraphs 1 to 47, wherein the RNA molecule comprises a 5′ cap, 5′ UTR, and 3′ UTR.
49. The RNA molecule of any one of paragraphs 1 to 48, wherein the RNA molecule comprises a 5′ cap, 5′ UTR, 3′ UTR, and poly-A tail.
50. The RNA molecule of any of paragraphs 1 to 49, comprising a 5′ UTR comprising the sequence of SEQ ID NO: 281 or 312, an open reading frame comprising the sequence of any of SEQ ID NO: 146 to 279 and a 3′ UTR comprising the sequence of SEQ ID NO: 284 or 317.
51. The RNA molecule of any of paragraphs 1 to 50, comprising a 5′ UTR comprising the sequence of any of SEQ ID NO: 28, 312 and 313, an open reading frame comprising the sequence of any of SEQ ID NO: 146 to 279, a 3′ UTR comprising the sequence of any of SEQ ID NO: 284, 314 and 317, and a poly-A tail comprising a sequences of any of SEQ ID NO: 287 and 315.
52. The RNA molecule of any one of paragraphs 1 to 51, wherein the open reading frame was generated from codon-optimized DNA.
53. The RNA molecule of any one of paragraphs 1 to 52, wherein the open reading frame comprises a G/C content of at least 55%, at least 60%, at least 65%, at least 70%, at least 75%, about 50% to 75%, about 55% to 70%, about 58%, about 66% or about 62%.
54. The RNA molecule of any one of paragraphs 1 to 53, wherein the encoded VZV polypeptide localizes in the cellular membrane, localizes in the Golgi and/or is anchored in the membrane and is secreted.
55. The RNA molecule of any of paragraphs 1 to 54, wherein the RNA molecule comprises stabilized RNA.
56. The RNA molecule of any one of paragraphs 1 to 55, wherein the RNA comprises at least one modified nucleotide.
57. The RNA molecule of paragraph 56, wherein the modified nucleotide is pseudouridine, N1-methylpseudouridine, N1-ethylpseudouridine, 2-thiouridine, 4′-thiouridine, 5-methylcytosine, 5-methyluridine, 2-thio-1-methyl-1-deaza-pseudouridine, 2-thio-1-methyl-pseudouridine, 2-thio-5-aza-uridine, 2-thio-dihydropseudouridine, 2-thio-dihydrouridine, 2-thio-pseudouridine, 4-methoxy-2-thio-pseudouridine, 4-methoxy-pseudouridine, 4-thio-1-methyl-pseudouridine, 4-thio-pseudouridine, 5-aza-uridine, dihydropseudouridine, 5-methoxyuridine or 2′-O-methyl uridine.
58. The RNA molecule of paragraph 56 or 57, wherein the modified nucleotide is N1-methylpseudouridine (ψ).
59. The RNA molecule of any one of paragraphs 1 to 58, wherein each uridine is replaced by N1-methylpseudouridine (ψ).
60. The RNA molecule of any one of paragraphs 1 to 59, wherein the RNA is mRNA or self-replicating RNA.
61. The RNA molecule of paragraph 60, wherein the RNA is a mRNA.
62. A composition comprising the RNA molecule of any one of paragraphs 1 to 61, wherein the RNA molecule is formulated in a lipid nanoparticle (LNP).
63. The composition of paragraph 62, wherein the lipid nanoparticle comprises at least one of a cationic lipid, a PEGylated lipid, and at least a first and second structural lipid.
64. The composition of paragraph 62 or 63, wherein the lipid nanoparticle comprises a cationic lipid.
65. The composition of paragraph 64, wherein the cationic lipid is (4-hydroxybutyl)azanediyl)bis(hexane-6,1-diyl)bis(2-hexyldecanoate) (ALC-0315).
66. The composition of any one of paragraphs 61 to 64, wherein the lipid nanoparticle comprises a PEGylated lipid.
67. The composition of any one of paragraphs 63 to 66, wherein the PEGylated lipid is PEG-modified phosphatidylethanolamine, PEG-modified phosphatidic acid, PEG-modified ceramides (e.g. PEG-CerC14 or PEG-CerC20), PEG-modified dialkylamines, PEG-modified diacylglycerols, PEG-modified dialkylglycerols, 2-[(polyethylene glycol)-2000]-N,N-ditetradecylacetamide, glycol-lipids including PEG-c-DOMG, PEG-c-DMA, PEG-s-DMG,N-[(methoxy polyethylene glycol)2000)carbamyl]-1,2-dimyristyloxlpropyl-3-amine (PEG-c-DMA), and PEG-2000-DMG, PEGylated diacylglycerol (PEG-DAG) such as 1-(monomethoxy-polyethyleneglycol)-2,3-dimyristoylglycerol (PEG-DMG), a PEGylated phosphatidylethanoloamine (PEG-PE), a PEG succinate diacylglycerol (PEG-S-DAG) such as 4-O-(2′,3′-di(tetradecanoyloxy)propyl-1-O-((o-methoxy(polyethoxy)ethyl)butanedioate (PEG-S-DMG), a PEGylated ceramide (PEG-cer), or a PEG dialkoxypropylcarbamate such as co-methoxy(polyethoxy)ethyl-N-(2,3di(tetradecanoxy)propyl)carbamate or 2,3-di(tetradecanoxy)propyl-N-(u>-methoxy(polyethoxy)ethyl)carbamate.
68. The composition of any one of paragraphs 63 to 67, wherein the PEGylated lipid is 2-[(polyethylene glycol)-2000]-N,N-ditetradecylacetamide (ALC-0159).
69. The composition of any one of paragraphs 63 to 68, wherein the first structural lipid is a neutral lipid.
70. The composition of paragraph 69, wherein the neutral lipid is 1,2-distearoyl-sn-glycero-3-phosphocholine (DSPC), distearoylphosphatidylcholine (DSPC), dioleoylphosphatidylcholine (DOPC), dipalmitoylphosphatidylcholine (DPPC), dioleoylphosphatidylglycerol (DOPG), dipalmitoylphosphatidylglycerol (DPPG), dioleoyl-phosphatidylethanolamine (DOPE), palmitoyloleoylphosphatidylcholine (POPC), palmitoyloleoyl-phosphatidylethanolamine (POPE) and dioleoyl-phosphatidylethanolamine 4-(N-maleimidomethyl)-cyclohexane-1 carboxylate (DOPE-mal), dipalmitoyl phosphatidyl ethanolamine (DPPE), dimyristoylphosphoethanolamine (DMPE), distearoyl-phosphatidylethanolamine (DSPE), 16-O-monomethyl PE, 16-O-dimethyl PE, 18-1-trans PE, 1-stearioyl-2-oleoylphosphatidyethanol amine (SOPE), or 1,2-dielaidoyl-sn-glycero-3-phophoethanolamine (transDOPE).
71. The composition of paragraph 69 or 70, wherein the neutral lipid is 1,2-distearoyl-sn-glycero-3-phosphocholine (DSPC).
72. The composition of any one of paragraphs 63 to 71, wherein the second structural lipid is a steroid or steroid analog.
73. The composition of paragraph 72, wherein the steroid or steroid analog is cholesterol.
74. The composition of any one of paragraphs 62 to 73, wherein lipid nanoparticle has a mean diameter of about 1 to about 500 nm.
75. The composition of any one of paragraphs 62 to 74, comprising an RNA molecule at a concentration of about 0.01 to 0.09 mg/mL formulated in a lipid nanoparticle (LNP) comprising a cationic lipid at a concentration of about 0.8 to 0.95 mg/mL, a PEGylated lipid at a concentration of about 0.05 to 0.15 mg/mL, a neutral lipid at a concentration of about 0.1 to 0.25 mg/mL and a steroid or steroid analog at a concentration of about 0.3 to 0.45 mg/mL.
76. The composition of any one of paragraphs 62 to 75, comprising an RNA molecule at a concentration of about 0.01 to 0.09 mg/mL formulated in a lipid nanoparticle (LNP) comprising (4-hydroxybutyl)azanediyl)bis(hexane-6,1-diyl)bis(2-hexyldecanoate) (ALC-0315) at a concentration of about 0.8 to 0.95 mg/mL, 2-[(polyethylene glycol)-2000]-N,N-ditetradecylacetamide (ALC-0159) at a concentration of about 0.05 to 0.15 mg/mL, 1,2-distearoyl-sn-glycero-3-phosphocholine (DSPC) at a concentration of about 0.1 to 0.25 mg/mL and cholesterol at a concentration of about 0.3 to 0.45 mg/mL.
77. The composition of any one of paragraphs 62 to 76, comprising an RNA molecule at a concentration of about 0.06 mg/mL formulated in a lipid nanoparticle (LNP).
78. The composition of any one of paragraphs 62 to 77, further comprising at least one of a buffer, a stabilizing agent, salt, surfactant, preservative, excipient, or adjuvant.
79. The composition of any one of paragraphs 62 to 78, further comprising at least a buffer and a stabilizing agent, and optionally, a salt diluent.
80. The composition of paragraph 79 or 79, wherein the buffer is a Tris buffer.
81. The composition of paragraph 80, wherein the Tris buffer comprises tromethamine and Tris hydrochloride (HCl).
82. The composition of paragraph 81, wherein the tromethamine is at a concentration of about 0.1 to 0.3 mg/mL or about 0.01 to 0.15 mg/mL.
83. The composition of paragraph 81 or 82, wherein and the Tris HCl is at a concentration of about 1.25 to 1.40 mg/mL or about 0.5 to 0.65 mg/mL.
84. The composition of any one of paragraphs 78 to 83, wherein the stabilizing agent is sucrose.
85. The composition of paragraph 84, wherein the sucrose is at a concentration of about 95 to 110 mg/mL or about 35 to 50 mg/mL.
86. The composition of any one of paragraphs 78 to 85, wherein the salt diluent for reconstitution is sodium chloride.
87. The composition of paragraph 86, wherein the sodium chloride is at a concentration of about 5 to 15 mg/mL.
88. The composition of any one of paragraphs 62 to 87, wherein the composition is a liquid or lyophilized.
89. The composition of paragraph 62, comprising an RNA molecule at a concentration of about 0.01 to 0.09 mg/mL formulated in a lipid nanoparticle (LNP) comprising a cationic lipid at a concentration of about 0.8 to 0.95 mg/mL, a PEGylated lipid at a concentration of about 0.05 to 0.15 mg/mL, a neutral lipid at a concentration of about 0.1 to 0.25 mg/mL and a steroid or steroid analog at a concentration of about 0.3 to 0.45 mg/mL, and further comprising a Tris buffer comprising tromethamine at a concentration of about 0.1 to 0.3 mg/mL and Tris hydrochloride (HCl) at a concentration of about 1.25 to 1.40 mg/mL, and sucrose at a concentration of about 95 to 110 mg/mL, wherein the composition is a liquid composition.
90. The composition of paragraph 62, comprising an RNA molecule at a concentration of about 0.01 to 0.09 mg/mL formulated in a lipid nanoparticle (LNP) comprising a cationic lipid at a concentration of about 0.8 to 0.95 mg/mL, a PEGylated lipid at a concentration of about 0.05 to 0.15 mg/mL, a neutral lipid at a concentration of about 0.1 to 0.25 mg/mL and a steroid or steroid analog at a concentration of about 0.3 to 0.45 mg/mL, and further comprising a Tris buffer comprising tromethamine at a concentration of about 0.01 to 0.15 mg/mL and Tris hydrochloride (HCl) at a concentration of about 0.5 to 0.65 mg/mL, sucrose at a concentration of about 35 to 50 mg/mL.
91. The composition of paragraph 90, wherein the composition is reconstituted with sodium chloride at a concentration of about 5 to 15 mg/mL.
92. The composition of paragraph 91, wherein the composition is reconstituted with about 0.6 to 0.75 mL sodium chloride.
93. The composition of paragraph 62, further comprising about 5 to 15 mM Tris buffer, 200 to 400 mM sucrose at a pH of about 7.0 to 8.0, and optionally, 0.9% sodium chloride diluent to reconstitute.
94. A method of inducing an immune response against VZV in a subject, comprising administering to the subject an effective amount of the RNA molecule and/or composition of any one of paragraphs 1 to 93.
95. A method of preventing, treating or ameliorating an infection, disease or condition in a subject, comprising administering to a subject an effective amount of the RNA molecule and/or composition of any one of paragraphs 1 to 93.
96. The method of paragraph 95, wherein the infection, disease or condition is associated with VZV.
97. The method of paragraph 95 or 96, wherein the infection, disease or condition is herpes zoster (shingles).
98. The method of paragraph 95 or 96, wherein the infection, disease or condition is postherpetic neuralgia.
99. Use of the RNA molecule and/or composition of any one of paragraphs 1 to 93 in the manufacture of a medicament for use in inducing an immune response against VZV in a subject.
100. Use of the RNA molecule or composition of any one of paragraphs 1 to 93 in the manufacture of a medicament for use in preventing, treating or ameliorating an infection, disease or condition in a subject.
101. The use of paragraph 100, wherein the infection, disease or condition is associated with VZV.
102. The use of paragraph 100 or 101, wherein the infection, disease or condition is herpes zoster (shingles).
103. The use of paragraph 100 or 101, wherein the infection, disease or condition is postherpetic neuralgia.
104. The method or use of any one of paragraphs 94 to 103, wherein the subject is less than about 1 year of age, about 1 year of age or older, about 5 years of age or older, about 10 years of age or older, about 20 years of age or older, about 30 years of age or older, about 40 years of age or older, about 50 years of age or older, about 60 years of age or older, about 70 years of age or older, or older.
105. The method or use of any one of paragraphs 94 to 104, wherein the subject the subject is about 50 years of age or older.
106. The method or use of any one of paragraphs 94 to 105, wherein the subject is immunocompetent.
107. The method or use of any one of paragraphs 94 to 105, wherein the subject is immunocompromised.
108. The method or use of any one of paragraphs 94 to 107, wherein the RNA molecule and/or composition is administered as a vaccine.
109. The method or use of any one of paragraphs 94 to 108, wherein the RNA molecule and/or composition is administered by intradermal or intramuscular injection.
110. The method or use of any one of paragraphs 94 to 109, wherein the subject is administered a single dose, two doses, three doses or more doses of the RNA molecule and/or composition.
111. The method or use of any one of paragraphs 94 to 110, wherein the subject is administered a single dose of the RNA molecule and/or composition.
112. The method or use of any one of paragraphs 94 to 110, wherein the subject is administered two doses of the RNA molecule and/or composition.
113. The method or use of any one of paragraphs 94 to 110, wherein the subject is administered two doses of the RNA molecule and/or composition on Day 0 and about 2 months later.
114. The method or use of any one of paragraphs 94 to 110, wherein the subject is administered two doses of the RNA molecule and/or composition on Day 0 and about 6 months later.
115. The method or use of any one of paragraphs 94 to 114, wherein the subject is administered at least one booster dose of the RNA molecule and/or composition.
116. The method or use of any one of paragraphs 94 to 115, wherein the subject is administered a dose of at least about 15 μg, at least about 30 μg, at least about 60 μg, at least about 90 μg, at least about 100 μg or higher RNA molecule and/or composition per administration.
117. The method or use of any one of paragraphs 94 to 116, wherein the subject is administered an injection with a volume of about 0.25 to 1 mL, including but not limited to, about 0.25, 0.5, 1 mL.

[0540] All of the methods disclosed and claimed herein can be made and executed without undue experimentation in light of the present disclosure. While the compositions and methods of this disclosure have been described in terms of certain aspects, it will be apparent to those of skill in the art that variations may be applied to the methods and in the steps or in the sequence of steps of the method described herein without departing from the concept, spirit and scope of the disclosure. More specifically, it will be apparent that certain agents which are both chemically and physiologically related may be substituted for the agents described herein while the same or similar results would be achieved. All such similar substitutes and modifications apparent to those skilled in the art are deemed to be within the spirit, scope and concept of the disclosure as defined by the appended claims.

[0541] The contents of all cited references (including literature references, issued patents, published patent applications, and GENBANK® Accession numbers as cited throughout this application) recited in the application, to the extent that they provide exemplary procedural or other details supplementary to those set forth herein, are hereby specifically and expressly incorporated by reference. When definitions of terms in documents that are incorporated by reference herein conflict with those used herein, the definitions used herein govern

LENGTHY TABLES
The patent application contains a lengthy table section. A copy of the table is available in electronic form from the USPTO web site (https://seqdata.uspto.gov/?pageRequest=docDetail&DocID=US20230233671A1). An electronic copy of the table will also be available from the USPTO upon request and payment of the fee set forth in 37 CFR 1.19(b)(3).

The application's sequence listing, which the Patent Office published only in electronic form, follows.

SEQUENCE LISTING (318 sequences)

SEQ ID NO: 1 - protein, 623 aa, Varicella zoster virus
MGTVNKPVVGVLMGFGIITGTLRITNPVRASVLRYDDFHIDEDKLDTNSVYEPYYHSDHAESSWVNRGESSRKAYDHNSPYIWPRNDYDGFLENAHEHHGVYNQGRGIDSGERLMQPTQMSAQEDLGDDTGIHVIPTLNGDDRHKIVNVDQRQYGDVFKGDLNPKPQGQRLIEVSVEENHPFTLRAPIQRIYGVRYTETWSFLPSLTCTGDAAPAIQHICLKHTTCFQDVVVDVDCAENTKEDQLAEISYRFQGKKEADQPWIVVNTSTLFDELELDPPEIEPGVLKVLRTEKQYLGVYIWNMRGSDGTSTYATFLVTWKGDEKTRNPTPAVTPQPRGAEFHMWNYHSHVFSVGDTFSLAMHLQYKIHEAPFDLLLEWLYVPIDPTCQPMRLYSTCLYHPNAPQCLSHMNSGCTFTSPHLAQRVASTVYQNCEHADNYTAYCLGISHMEPSFGLILHDGGTTLKFVDTPESLSGLYVFVVYFNGHVEAVAYTVVSTVDHFVNAIEERGFPPTAGQPPATTKPKEITPVNPGTSPLIRYAAWTGGLAAVVLLCLVIFLICTAKRMRVKAYRVDKSPYNQSMYYAGLPVDDFEDSESTDTEEEFGNAIGGSHGGSSYTVYIDKTR

SEQ ID NO: 2 - protein, 546 aa, synthetic construct
MGTVNKPVVGVLMGFGIITGTLRITNPVRASVLRYDDFHIDEDKLDTNSVYEPYYHSDHAESSWVNRGESSRKAYDHNSPYIWPRNDYDGFLENAHEHHGVYNQGRGIDSGERLMQPTQMSAQEDLGDDTGIHVIPTLNGDDRHKIVNVDQRQYGDVFKGDLNPKPQGQRLIEVSVEENHPFTLRAPIQRIYGVRYTETWSFLPSLTCTGDAAPAIQHICLKHTTCFQDVVVDVDCAENTKEDQLAEISYRFQGKKEADQPWIVVNTSTLFDELELDPPEIEPGVLKVLRTEKQYLGVYIWNMRGSDGTSTYATFLVTWKGDEKTRNPTPAVTPQPRGAEFHMWNYHSHVFSVGDTFSLAMHLQYKIHEAPFDLLLEWLYVPIDPTCQPMRLYSTCLYHPNAPQCLSHMNSGCTFTSPHLAQRVASTVYQNCEHADNYTAYCLGISHMEPSFGLILHDGGTTLKFVDTPESLSGLYVFVVYFNGHVEAVAYTVVSTVDHFVNAIEERGFPPTAGQPPATTKPKEITPVNPGTSPLIRYAAWTGGLA

SEQ ID NO: 3 - protein, 623 aa, synthetic construct
MGTVNKPVVGVLMGFGIITGTLRITNPVRASVLRYDDFHIDEDKLDTNSVYEPYYHSDHAESSWVNRGESSRKAYDHNSPYIWPRNDYDGFLENAHEHHGVYNQGRGIDSGERLMQPTQMSAQEDLGDDTGIHVIPTLNGDDRHKIVNVDQRQYGDVFKGDLNPKPQGQRLIEVSVEENHPFTLRAPIQRIYGVRYTETWSFLPSLTCTGDAAPAIQHICLKHTTCFQDVVVDVDCAENTKEDQLAEISYRFQGKKEADQPWIVVNTSTLFDELELDPPEIEPGVLKVLRTEKQYLGVYIWNMRGSDGTSTYATFLVTWKGDEKTRNPTPAVTPQPRGAEFHMWNYHSHVFSVGDTFSLAMHLQYKIHEAPFDLLLEWLYVPIDPTCQPMRLYSTCLYHPNAPQCLSHMNSGCTFTSPHLAQRVASTVYQNCEHADNYTAYCLGISHMEPSFGLILHDGGTTLKFVDTPESLSGLYVFVVYFNGHVEAVAYTVVSTVDHFVNAIEERGFPPTAGQPPATTKPKEITPVNPGTSPLIRYAAWTGGLAAVVLLCLVIFLICTAKRMRVKAYRVDKSPYNQSMYAAGLPVDDFEDSESTDTEEEFGNAIGGSHGGSSYTVYIDKTR

SEQ ID NO: 4 - protein, 581 aa, synthetic construct
MGTVNKPVVGVLMGFGIITGTLRITNPVRASVLRYDDFHIDEDKLDTNSVYEPYYHSDHAESSWVNRGESSRKAYDHNSPYIWPRNDYDGFLENAHEHHGVYNQGRGIDSGERLMQPTQMSAQEDLGDDTGIHVIPTLNGDDRHKIVNVDQRQYGDVFKGDLNPKPQGQRLIEVSVEENHPFTLRAPIQRIYGVRYTETWSFLPSLTCTGDAAPAIQHICLKHTTCFQDVVVDVDCAENTKEDQLAEISYRFQGKKEADQPWIVVNTSTLFDELELDPPEIEPGVLKVLRTEKQYLGVYIWNMRGSDGTSTYATFLVTWKGDEKTRNPTPAVTPQPRGAEFHMWNYHSHVFSVGDTFSLAMHLQYKIHEAPFDLLLEWLYVPIDPTCQPMRLYSTCLYHPNAPQCLSHMNSGCTFTSPHLAQRVASTVYQNCEHADNYTAYCLGISHMEPSFGLILHDGGTTLKFVDTPESLSGLYVFVVYFNGHVEAVAYTVVSTVDHFVNAIEERGFPPTAGQPPATTKPKEITPVNPGTSPLIRYAAWTGGLAAVVLLCLVIFLICTAKRMRVKAYRVDKSPYNQSMY

SEQ ID NO: 5 - protein, 538 aa, synthetic construct
MGTVNKPVVGVLMGFGIITGTLRITNPVRASVLRYDDFHIDEDKLDTNSVYEPYYHSDHAESSWVNRGESSRKAYDHNSPYIWPRNDYDGFLENAHEHHGVYNQGRGIDSGERLMQPTQMSAQEDLGDDTGIHVIPTLNGDDRHKIVNVDQRQYGDVFKGDLNPKPQGQRLIEVSVEENHPFTLRAPIQRIYGVRYTETWSFLPSLTCTGDAAPAIQHICLKHTTCFQDVVVDVDCAENTKEDQLAEISYRFQGKKEADQPWIVVNTSTLFDELELDPPEIEPGVLKVLRTEKQYLGVYIWNMRGSDGTSTYATFLVTWKGDEKTRNPTPAVTPQPRGAEFHMWNYHSHVFSVGDTFSLAMHLQYKIHEAPFDLLLEWLYVPIDPTCQPMRLYSTCLYHPNAPQCLSHMNSGCTFTSPHLAQRVASTVYQNCEHADNYTAYCLGISHMEPSFGLILHDGGTTLKFVDTPESLSGLYVFVVYFNGHVEAVAYTVVSTVDHFVNAIEERGFPPTAGQPPATTKPKEITPVNPGTSPLIRY

SEQ ID NO: 6 - protein, 608 aa, synthetic construct
MGTVNKPVVGVLMGFGIITGTLRITNPVRASVLRYDDFHIDEDKLDTNSVYEPYYHSDHAESSWVNRGESSRKAYDHNSPYIWPRNDYDGFLENAHEHHGVYNQGRGIDSGERLMQPTQMSAQEDLGDDTGIHVIPTLNGDDRHKIVNVDQRQYGDVFKGDLNPKPQGQRLIEVSVEENHPFTLRAPIQRIYGVRYTETWSFLPSLTCTGDAAPAIQHICLKHTTCFQDVVVDVDCAENTKEDQLAEISYRFQGKKEADQPWIVVNTSTLFDELELDPPEIEPGVLKVLRTEKQYLGVYIWNMRGSDGTSTYATFLVTWKGDEKTRNPTPAVTPQPRGAEFHMWNYHSHVFSVGDTFSLAMHLQYKIHEAPFDLLLEWLYVPIDPTCQPMRLYSTCLYHPNAPQCLSHMNSGCTFTSPHLAQRVASTVYQNCEHADNYTAYCLGISHMEPSFGLILHDGGTTLKFVDTPESLSGLYVFVVYFNGHVEAVAYTVVSTVDHFVNAIEERGFPPTAGQPPATTKPKEITPVNPGTSPLIRYAAWTGGLAAVVLLCLVIFLICTAKRMRVKAYRVDKSPYNQSMYYAGLPVGNAIGGSHGGSSYTVYIDKTR

SEQ ID NO: 7 - protein, 608 aa, synthetic construct
MGTVNKPVVGVLMGFGIITGTLRITNPVRASVLRYDDFHIDEDKLDTNSVYEPYYHSDHAESSWVNRGESSRKAYDHNSPYIWPRNDYDGFLENAHEHHGVYNQGRGIDSGERLMQPTQMSAQEDLGDDTGIHVIPTLNGDDRHKIVNVDQRQYGDVFKGDLNPKPQGQRLIEVSVEENHPFTLRAPIQRIYGVRYTETWSFLPSLTCTGDAAPAIQHICLKHTTCFQDVVVDVDCAENTKEDQLAEISYRFQGKKEADQPWIVVNTSTLFDELELDPPEIEPGVLKVLRTEKQYLGVYIWNMRGSDGTSTYATFLVTWKGDEKTRNPTPAVTPQPRGAEFHMWNYHSHVFSVGDTFSLAMHLQYKIHEAPFDLLLEWLYVPIDPTCQPMRLYSTCLYHPNAPQCLSHMNSGCTFTSPHLAQRVASTVYQNCEHADNYTAYCLGISHMEPSFGLILHDGGTTLKFVDTPESLSGLYVFVVYFNGHVEAVAYTVVSTVDHFVNAIEERGFPPTAGQPPATTKPKEITPVNPGTSPLIRYAAWTGGLAAVVLLCLVIFLICTAKRMRVKAARVDKSPYNQSMYYAGLPVGNAIGGSHGGSSYTVYIDKTR

SEQ ID NO: 8 - protein, 573 aa, synthetic construct
MGTVNKPVVGVLMGFGIITGTLRITNPVRASVLRYDDFHIDEDKLDTNSVYEPYYHSDHAESSWVNRGESSRKAYDHNSPYIWPRNDYDGFLENAHEHHGVYNQGRGIDSGERLMQPTQMSAQEDLGDDTGIHVIPTLNGDDRHKIVNVDQRQYGDVFKGDLNPKPQGQRLIEVSVEENHPFTLRAPIQRIYGVRYTETWSFLPSLTCTGDAAPAIQHICLKHTTCFQDVVVDVDCAENTKEDQLAEISYRFQGKKEADQPWIVVNTSTLFDELELDPPEIEPGVLKVLRTEKQYLGVYIWNMRGSDGTSTYATFLVTWKGDEKTRNPTPAVTPQPRGAEFHMWNYHSHVFSVGDTFSLAMHLQYKIHEAPFDLLLEWLYVPIDPTCQPMRLYSTCLYHPNAPQCLSHMNSGCTFTSPHLAQRVASTVYQNCEHADNYTAYCLGISHMEPSFGLILHDGGTTLKFVDTPESLSGLYVFVVYFNGHVEAVAYTVVSTVDHFVNAIEERGFPPTAGQPPATTKPKEITPVNPGTSPLIRYAAWTGGLAAVVLLCLVIFLICTAKRMRVKAARVDK

SEQ ID NO: 9 - protein, 623 aa, synthetic construct
MGTVNKPVVGVLMGFGIITGTLRITNPVRASVLRYDDFHIDEDKLDTNSVYEPYYHSDHAESSWVNRGESSRKAYDHNSPYIWPRNDYDGFLENAHEHHGVYNQGRGIDSGERLMQPTQMSAQEDLGDDTGIHVIPTLNGDDRHKIVNVDQRQYGDVFKGDLNPKPQGQRLIEVSVEENHPFTLRAPIQRIYGVRYTETWSFLPSLTCTGDAAPAIQHICLKHTTCFQDVVVDVDCAENTKEDQLAEISYRFQGKKEADQPWIVVNTSTLFDELELDPPEIEPGVLKVLRTEKQYLGVYIWNMRGSDGTSTYATFLVTWKGDEKTRNPTPAVTPQPRGAEFHMWNYHSHVFSVGDTFSLAMHLQYKIHEAPFDLLLEWLYVPIDPTCQPMRLYSTCLYHPNAPQCLSHMNSGCTFTSPHLAQRVASTVYQNCEHADNYTAYCLGISHMEPSFGLILHDGGTTLKFVDTPESLSGLYVFVVYFNGHVEAVAYTVVSTVDHFVNAIEERGFPPTAGQPPATTKPKEITPVNPGTSPLIRYAAWTGGLAAVVLLCLVIFLICTAKRMRVKAARVDKSPYNQSMYAAGLPVDDFEDSESTDTEEEFGNAIGGSHGGSSYTVYIDKTR

SEQ ID NO: 10 - protein, 581 aa, synthetic construct
MGTVNKPVVGVLMGFGIITGTLRITNPVRASVLRYDDFHIDEDKLDTNSVYEPYYHSDHAESSWVNRGESSRKAYDHNSPYIWPRNDYDGFLENAHEHHGVYNQGRGIDSGERLMQPTQMSAQEDLGDDTGIHVIPTLNGDDRHKIVNVDQRQYGDVFKGDLNPKPQGQRLIEVSVEENHPFTLRAPIQRIYGVRYTETWSFLPSLTCTGDAAPAIQHICLKHTTCFQDVVVDVDCAENTKEDQLAEISYRFQGKKEADQPWIVVNTSTLFDELELDPPEIEPGVLKVLRTEKQYLGVYIWNMRGSDGTSTYATFLVTWKGDEKTRNPTPAVTPQPRGAEFHMWNYHSHVFSVGDTFSLAMHLQYKIHEAPFDLLLEWLYVPIDPTCQPMRLYSTCLYHPNAPQCLSHMNSGCTFTSPHLAQRVASTVYQNCEHADNYTAYCLGISHMEPSFGLILHDGGTTLKFVDTPESLSGLYVFVVYFNGHVEAVAYTVVSTVDHFVNAIEERGFPPTAGQPPATTKPKEITPVNPGTSPLIRYAAWTGGLAAVVLLCLVIFLICTAKRMRVKAARVDKSPYNQSMY

SEQ ID NO: 11 - protein, 1246 aa, synthetic construct
MGTVNKPVVGVLMGFGIITGTLRITNPVRASVLRYDDFHIDEDKLDTNSVYEPYYHSDHAESSWVNRGESSRKAYDHNSPYIWPRNDYDGFLENAHEHHGVYNQGRGIDSGERLMQPTQMSAQEDLGDDTGIHVIPTLNGDDRHKIVNVDQRQYGDVFKGDLNPKPQGQRLIEVSVEENHPFTLRAPIQRIYGVRYTETWSFLPSLTCTGDAAPAIQHICLKHTTCFQDVVVDVDCAENTKEDQLAEISYRFQGKKEADQPWIVVNTSTLFDELELDPPEIEPGVLKVLRTEKQYLGVYIWNMRGSDGTSTYATFLVTWKGDEKTRNPTPAVTPQPRGAEFHMWNYHSHVFSVGDTFSLAMHLQYKIHEAPFDLLLEWLYVPIDPTCQPMRLYSTCLYHPNAPQCLSHMNSGCTFTSPHLAQRVASTVYQNCEHADNYTAYCLGISHMEPSFGLILHDGGTTLKFVDTPESLSGLYVFVVYFNGHVEAVAYTVVSTVDHFVNAIEERGFPPTAGQPPATTKPKEITPVNPGTSPLIRYAAWTGGLAAVVLLCLVIFLICTAKRMRVKAYRVDKSPYNQSMYYAGLPVDDFEDSESTDTEEEFGNAIGGSHGGSSYTVYIDKTRMGTVNKPVVGVLMGFGIITGTLRITNPVRASVLRYDDFHIDEDKLDTNSVYEPYYHSDHAESSWVNRGESSRKAYDHNSPYIWPRNDYDGFLENAHEHHGVYNQGRGIDSGERLMQPTQMSAQEDLGDDTGIHVIPTLNGDDRHKIVNVDQRQYGDVFKGDLNPKPQGQRLIEVSVEENHPFTLRAPIQRIYGVRYTETWSFLPSLTCTGDAAPAIQHICLKHTTCFQDVVVDVDCAENTKEDQLAEISYRFQGKKEADQPWIVVNTSTLFDELELDPPEIEPGVLKVLRTEKQYLGVYIWNMRGSDGTSTYATFLVTWKGDEKTRNPTPAVTPQPRGAEFHMWNYHSHVFSVGDTFSLAMHLQYKIHEAPFDLLLEWLYVPIDPTCQPMRLYSTCLYHPNAPQCLSHMNSGCTFTSPHLAQRVASTVYQNCEHADNYTAYCLGISHMEPSFGLILHDGGTTLKFVDTPESLSGLYVFVVYFNGHVEAVAYTVVSTVDHFVNAIEERGFPPTAGQPPATTKPKEITPVNPGTSPLIRYAAWTGGLAAVVLLCLVIFLICTAKRMRVKAYRVDKSPYNQSMYYAGLPVDDFEDSESTDTEEEFGNAIGGSHGGSSYTVYIDKTR

SEQ ID NO: 12 - DNA, 1869 bp, Varicella zoster virus
  source 1..1869: mol_type = genomic DNA
atggggacagttaataaacctgtggtgggggtattgatggggttcggaattatcacgggaacgttgcgtataacgaatccggtcagagcatccgtcttgcgatacgatgattttcacatcgatgaagacaaactggatacaaactccgtatatgagccttactaccattcagatcatgcggagtcttcatgggtaaatcggggagagtcttcgcgaaaagcgtacgatcataactcaccttatatatggccacgtaatgattatgatggatttttagagaacgcacacgaacaccatggggtgtataatcagggccgtggtatcgatagcggggaacggttaatgcaacccacacaaatgtctgcacaggaggatcttggggacgatacgggcatccacgttatccctacgttaaacggcgatgacagacataaaattgtaaatgtggaccaacgtcaatacggtgacgtgtttaaaggagatcttaatccaaaaccccaaggccaaagactcattgaggtgtcagtggaagaaaatcacccgtttactttacgcgcaccgattcagcggatttatggagtccggtacaccgagacttggagctttttgccgtcattaacctgtacgggagacgcagcgcccgccatccagcatatatgcttaaaacatacaacatgctttcaagacgtggtggtggatgtggattgcgcggaaaatactaaagaggatcagttggccgaaatcagttaccgttttcaaggtaagaaggaagcggaccaaccgtggattgttgtaaacacgagcacactgtttgatgaactcgaattagacccccccgagattgaaccgggtgtcttgaaagtacttcggacagaaaaacaatacttgggtgtgtacatttggaacatgcgcggctccgatggtacgtctacctacgccacgtttttggtcacctggaaaggggatgaaaaaacaagaaaccctacgcccgcagtaactcctcaaccaagaggggctgagtttcatatgtggaattaccactcgcatgtattttcagttggtgatacgtttagcttggcaatgcatcttcagtataagatacatgaagcgccatttgatttgctgttagagtggttgtatgtccccatcgatcctacatgtcaaccaatgcggttatattctacgtgtttgtatcatcccaacgcaccccaatgcctctctcatatgaattccggttgtacatttacctcgccacatttagcccagcgtgttgcaagcacagtgtatcaaaattgtgaacatgcagataactacaccgcatattgtctgggaatatctcatatggagcctagctttggtctaatcttacacgacgggggcaccacgttaaagtttgtagatacacccgagagtttgtcgggattatacgtttttgtggtgtattttaacgggcatgttgaagccgtagcatacactgttgtatccacagtagatcattttgtaaacgcaattgaagagcgtggatttccgccaacggccggtcagccaccggcgactactaaacccaaggaaattacccccgtaaaccccggaacgtcaccacttatacgatatgccgcatggaccggagggcttgcagcagtagtacttttatgtctcgtaatatttttaatctgtacggctaaacgaatgagggttaaagcctatagggtagacaagtccccgtataaccaaagcatgtattacgctggccttccagtggacgatttcgaggactcggaatctacggatacggaagaagagtttggtaacgcgattggagggagtcacgggggttcgagttacacggtgtatatagataagacccgg

SEQ ID NO: 13 - DNA, 1869 bp, synthetic construct
  source 1..1869: mol_type = other DNA
atgggcaccgtgaacaagcctgttgtgggcgtgctgatgggcttcggcatcatcacaggcaccctgcggatcaccaatcctgtgcgggctagcgtgctgagatacgacgacttccacatcgacgaggacaagctggacaccaacagcgtgtacgagccctactaccacagcgatcacgccgagtctagctgggtcaacagaggcgagagcagcagaaaggcctacgaccacaacagcccctacatctggccccggaacgactacgatggcttcctggaaaatgcccacgagcaccacggcgtgtacaatcaaggcagaggcatcgacagcggcgagagactgatgcagcctacacagatgagcgcccaagaggacctgggagatgataccggcatccacgtgatccccacactgaacggcgacgacagacacaagatcgtgaacgtggaccagcggcagtacggcgacgtgttcaagggcgacctgaatcctaagcctcagggccagcgcctgatcgaggtgtccgtggaggagaatcaccccttcacactgagagcccctatccagagaatctacggcgtgcgctataccgagacatggtcctttctgcccagcctgacatgtaccggggatgccgctcctgccatccagcacatttgcctgaagcacaccacctgtttccaggacgtggtggtggatgtggactgcgccgagaacaccaaagaggatcagctggccgagatcagctaccggttccagggaaagaaagaggccgaccagccttggatcgtggtcaacaccagcacactgttcgacgagctggaactggaccctcctgagattgaacccggggtgctgaaggtgctgagaaccgagaagcagtacctgggagtgtacatctggaacatgagaggcagcgacggcacctctacctacgccacctttctggtcacatggaagggcgacgagaaaacacggaaccccacaccagctgtgacccctcaacctagaggcgccgagtttcacatgtggaattaccacagccacgtgttcagcgtgggcgatacctttagcctggccatgcatctgcagtacaagatccacgaggcccctttcgacctgctgctggaatggctgtacgtgcccatcgatcctacctgccagcctatgcggctgtactccacctgtctgtatcaccccaacgctccccagtgcctgagccacatgaatagcggctgcaccttcacaagccctcacctggctcagcgagtggccagcacagtgtaccagaattgcgagcacgccgacaattacaccgcctactgtctgggcatcagccacatggaacctagcttcggcctgatcctgcacgatggcggcacaaccctgaagttcgtggatacccctgagagcctgagcggcctgtatgtgttcgtggtgtacttcaacggccacgtggaagccgtggcctacaccgtggtgtctaccgtggaccacttcgtgaacgccatcgaggaaagaggcttccctccaactgctggacagcctcctgccaccaccaagcctaaagaaatcacacccgtgaatcccggcacaagcccactgatcagatacgccgcttggacaggcggactggctgctgttgttctgctgtgcctggtcatcttcctgatctgcaccgccaagcggatgagagtgaaggcctacagagtggacaagagcccttacaaccagagcatgtactacgccggcctgcctgtggacgacttcgaggatagcgagagcaccgacaccgaggaggagttcggcaacgccattggaggatctcacggcggcagcagctataccgtgtacatcgacaagacccgg

SEQ ID NO: 14 - DNA, 1869 bp, synthetic construct
  source 1..1869: mol_type = other DNA
atgggcaccgtgaacaagcccgtggtgggcgtgctgatgggcttcggcatcatcaccggcaccctgcgcatcaccaaccccgtgcgcgccagcgtgctgcgctacgacgacttccacatcgacgaggacaagctggacaccaacagcgtgtacgagccctactaccacagcgaccacgccgagagcagctgggtgaaccgcggcgagagcagccgcaaggcctacgaccacaacagcccctacatctggccccgcaacgactacgacggcttcctggagaacgcccacgagcaccacggcgtgtacaaccagggccgcggcatcgacagcggcgagcgcctgatgcagcccacccagatgagcgcccaggaggacctgggcgacgacaccggcatccacgtgatccccaccctgaacggcgacgaccgccacaagatcgtgaacgtggaccagcgccagtacggcgacgtgttcaagggcgacctgaaccccaagccccagggccagcgcctgatcgaggtgagcgtggaggagaaccaccccttcaccctgcgcgcccccatccagcgcatctacggcgtgcgctacaccgagacctggagcttcctgcccagcctgacctgcaccggcgacgccgcccccgccatccagcacatctgcctgaagcacaccacctgcttccaggacgtggtggtggacgtggactgcgccgagaacaccaaggaggaccagctggccgagatcagctaccgcttccagggcaagaaggaggccgaccagccctggatcgtggtgaacaccagcaccctgttcgacgagctggagctggacccccccgagatcgagcccggcgtgctgaaggtgctgcgcaccgagaagcagtacctgggcgtgtacatctggaacatgcgcggcagcgacggcaccagcacctacgccaccttcctggtgacctggaagggcgacgaaaagacccgcaaccccacccccgccgtgaccccccagccccgcggcgccgagttccacatgtggaactaccacagccacgtgttcagcgtgggcgacaccttcagcctggccatgcacctgcagtacaagatccacgaggcccccttcgacctgctgctggagtggctgtacgtgcccatcgaccccacctgccagcccatgcgcctgtacagcacctgcctgtaccaccccaacgccccccagtgcctgagccacatgaacagcggctgcaccttcaccagcccccacctggcccagcgcgtggccagcaccgtgtaccagaactgcgagcacgccgacaactacaccgcctactgcctgggcatcagccacatggagcccagcttcggcctgatcctgcacgacggcggcaccaccctgaagttcgtggacacccccgagagcctgagcggcctgtacgtgttcgtggtgtacttcaacggccacgtggaggccgtggcctacaccgtggtgagcaccgtggaccacttcgtgaacgccatcgaggagcgcggcttcccccccaccgccggccagccccccgccaccaccaagcccaaggagatcacccccgtgaaccccggcaccagccccctgatccgctacgccgcctggaccggcggcctggccgccgtggtgctgctgtgcctggtgatcttcctgatctgcaccgccaagcgcatgcgcgtgaaggcctaccgcgtggacaagagcccctacaaccagagcatgtactacgccggcctgcccgtggacgacttcgaggacagcgagagcaccgacaccgaggaggagttcggcaacgccatcggcggcagccacggcggcagcagctacaccgtgtacatcgacaagacccgc

SEQ ID NO: 15 - DNA, 1638 bp, synthetic construct
  source 1..1638: mol_type = other DNA
atgggcaccgtgaacaagcctgttgtgggcgtgctgatgggcttcggcatcatcacaggcaccctgcggatcaccaatcctgtgcgggctagcgtgctgagatacgacgacttccacatcgacgaggacaagctggacaccaacagcgtgtacgagccctactaccacagcgatcacgccgagtctagctgggtcaacagaggcgagagcagcagaaaggcctacgaccacaacagcccctacatctggccccggaacgactacgatggcttcctggaaaatgcccacgagcaccacggcgtgtacaatcaaggcagaggcatcgacagcggcgagagactgatgcagcctacacagatgagcgcccaagaggacctgggagatgataccggcatccacgtgatccccacactgaacggcgacgacagacacaagatcgtgaacgtggaccagcggcagtacggcgacgtgttcaagggcgacctgaatcctaagcctcagggccagcgcctgatcgaggtgtccgtggaggagaatcaccccttcacactgagagcccctatccagagaatctacggcgtgcgctataccgagacatggtcctttctgcccagcctgacatgtaccggggatgccgctcctgccatccagcacatttgcctgaagcacaccacctgtttccaggacgtggtggtggatgtggactgcgccgagaacaccaaagaggatcagctggccgagatcagctaccggttccagggaaagaaagaggccgaccagccttggatcgtggtcaacaccagcacactgttcgacgagctggaactggaccctcctgagattgaacccggggtgctgaaggtgctgagaaccgagaagcagtacctgggagtgtacatctggaacatgagaggcagcgacggcacctctacctacgccacctttctggtcacatggaagggcgacgagaaaacacggaaccccacaccagctgtgacccctcaacctagaggcgccgagtttcacatgtggaattaccacagccacgtgttcagcgtgggcgatacctttagcctggccatgcatctgcagtacaagatccacgaggcccctttcgacctgctgctggaatggctgtacgtgcccatcgatcctacctgccagcctatgcggctgtactccacctgtctgtatcaccccaacgctccccagtgcctgagccacatgaatagcggctgcaccttcacaagccctcacctggctcagcgagtggccagcacagtgtaccagaattgcgagcacgccgacaattacaccgcctactgtctgggcatcagccacatggaacctagcttcggcctgatcctgcacgatggcggcacaaccctgaagttcgtggatacccctgagagcctgagcggcctgtatgtgttcgtggtgtacttcaacggccacgtggaagccgtggcctacaccgtggtgtctaccgtggaccacttcgtgaacgccatcgaggaaagaggcttccctccaactgctggacagcctcctgccaccaccaagcctaaagaaatcacacccgtgaatcccggcacaagcccactgatcagatacgccgcttggacaggcggactggct

SEQ ID NO: 16 - DNA, 1638 bp, synthetic construct
  source 1..1638: mol_type = other DNA
atgggcaccgtgaacaagcccgtggtgggcgtgctgatgggcttcggcatcatcaccggcaccctgcgcatcaccaaccccgtgcgcgccagcgtgctgcgctacgacgacttccacatcgacgaggacaagctggacaccaacagcgtgtacgagccctactaccacagcgaccacgccgagagcagctgggtgaaccgcggcgagagcagccgcaaggcctacgaccacaacagcccctacatctggccccgcaacgactacgacggcttcctggagaacgcccacgagcaccacggcgtgtacaaccagggccgcggcatcgacagcggcgagcgcctgatgcagcccacccagatgagcgcccaggaggacctgggcgacgacaccggcatccacgtgatccccaccctgaacggcgacgaccgccacaagatcgtgaacgtggaccagcgccagtacggcgacgtgttcaagggcgacctgaaccccaagccccagggccagcgcctgatcgaggtgagcgtggaggagaaccaccccttcaccctgcgcgcccccatccagcgcatctacggcgtgcgctacaccgagacctggagcttcctgcccagcctgacctgcaccggcgacgccgcccccgccatccagcacatctgcctgaagcacaccacctgcttccaggacgtggtggtggacgtggactgcgccgagaacaccaaggaggaccagctggccgagatcagctaccgcttccagggcaagaaggaggccgaccagccctggatcgtggtgaacaccagcaccctgttcgacgagctggagctggacccccccgagatcgagcccggcgtgctgaaggtgctgcgcaccgagaagcagtacctgggcgtgtacatctggaacatgcgcggcagcgacggcaccagcacctacgccaccttcctggtgacctggaagggcgacgaaaagacccgcaaccccacccccgccgtgaccccccagccccgcggcgccgagttccacatgtggaactaccacagccacgtgttcagcgtgggcgacaccttcagcctggccatgcacctgcagtacaagatccacgaggcccccttcgacctgctgctggagtggctgtacgtgcccatcgaccccacctgccagcccatgcgcctgtacagcacctgcctgtaccaccccaacgccccccagtgcctgagccacatgaacagcggctgcaccttcaccagcccccacctggcccagcgcgtggccagcaccgtgtaccagaactgcgagcacgccgacaactacaccgcctactgcctgggcatcagccacatggagcccagcttcggcctgatcctgcacgacggcggcaccaccctgaagttcgtggacacccccgagagcctgagcggcctgtacgtgttcgtggtgtacttcaacggccacgtggaggccgtggcctacaccgtggtgagcaccgtggaccacttcgtgaacgccatcgaggagcgcggcttcccccccaccgccggccagccccccgccaccaccaagcccaaggagatcacccccgtgaaccccggcaccagccccctgatccgctacgccgcctggaccggcggcctggcc

SEQ ID NO: 17 - DNA, 1869 bp, synthetic construct
  source 1..1869: mol_type = other DNA
atgggcaccgtgaacaagcctgttgtgggcgtgctgatgggcttcggcatcatcacaggcaccctgcggatcaccaatcctgtgcgggctagcgtgctgagatacgacgacttccacatcgacgaggacaagctggacaccaacagcgtgtacgagccctactaccacagcgatcacgccgagtctagctgggtcaacagaggcgagagcagcagaaaggcctacgaccacaacagcccctacatctggccccggaacgactacgatggcttcctggaaaatgcccacgagcaccacggcgtgtacaatcaaggcagaggcatcgacagcggcgagagactgatgcagcctacacagatgagcgcccaagaggacctgggagatgataccggcatccacgtgatccccacactgaacggcgacgacagacacaagatcgtgaacgtggaccagcggcagtacggcgacgtgttcaagggcgacctgaatcctaagcctcagggccagcgcctgatcgaggtgtccgtggaggagaatcaccccttcacactgagagcccctatccagagaatctacggcgtgcgctataccgagacatggtcctttctgcccagcctgacatgtaccggggatgccgctcctgccatccagcacatttgcctgaagcacaccacctgtttccaggacgtggtggtggatgtggactgcgccgagaacaccaaagaggatcagctggccgagatcagctaccggttccagggaaagaaagaggccgaccagccttggatcgtggtcaacaccagcacactgttcgacgagctggaactggaccctcctgagattgaacccggggtgctgaaggtgctgagaaccgagaagcagtacctgggagtgtacatctggaacatgagaggcagcgacggcacctctacctacgccacctttctggtcacatggaagggcgacgagaaaacacggaaccccacaccagctgtgacccctcaacctagaggcgccgagtttcacatgtggaattaccacagccacgtgttcagcgtgggcgatacctttagcctggccatgcatctgcagtacaagatccacgaggcccctttcgacctgctgctggaatggctgtacgtgcccatcgatcctacctgccagcctatgcggctgtactccacctgtctgtatcaccccaacgctccccagtgcctgagccacatgaatagcggctgcaccttcacaagccctcacctggctcagcgagtggccagcacagtgtaccagaattgcgagcacgccgacaattacaccgcctactgtctgggcatcagccacatggaacctagcttcggcctgatcctgcacgatggcggcacaaccctgaagttcgtggatacccctgagagcctgagcggcctgtatgtgttcgtggtgtacttcaacggccacgtggaagccgtggcctacaccgtggtgtctaccgtggaccacttcgtgaacgccatcgaggaaagaggcttccctccaactgctggacagcctcctgccaccaccaagcctaaagaaatcacacccgtgaatcccggcacaagcccactgatcagatacgccgcttggacaggcggactggctgctgttgttctgctgtgcctggtcatcttcctgatctgcaccgccaagcggatgagagtgaaggcctacagagtggacaagagcccttacaaccagagcatgtacgccgccggcctgcctgtggacgacttcgaggatagcgagagcaccgacaccgaggaggagttcggcaacgccattggaggatctcacggcggcagcagctataccgtgtacatcgacaagacccgg

SEQ ID NO: 18 - DNA, 1869 bp, synthetic construct
  source 1..1869: mol_type = other DNA
atgggcaccgtgaacaagcccgtggtgggcgtgctgatgggcttcggcatcatcaccggcaccctgcgcatcaccaaccccgtgcgcgccagcgtgctgcgctacgacgacttccacatcgacgaggacaagctggacaccaacagcgtgtacgagccctactaccacagcgaccacgccgagagcagctgggtgaaccgcggcgagagcagccgcaaggcctacgaccacaacagcccctacatctggccccgcaacgactacgacggcttcctggagaacgcccacgagcaccacggcgtgtacaaccagggccgcggcatcgacagcggcgagcgcctgatgcagcccacccagatgagcgcccaggaggacctgggcgacgacaccggcatccacgtgatccccaccctgaacggcgacgaccgccacaagatcgtgaacgtggaccagcgccagtacggcgacgtgttcaagggcgacctgaaccccaagccccagggccagcgcctgatcgaggtgagcgtggaggagaaccaccccttcaccctgcgcgcccccatccagcgcatctacggcgtgcgctacaccgagacctggagcttcctgcccagcctgacctgcaccggcgacgccgcccccgccatccagcacatctgcctgaagcacaccacctgcttccaggacgtggtggtggacgtggactgcgccgagaacaccaaggaggaccagctggccgagatcagctaccgcttccagggcaagaaggaggccgaccagccctggatcgtggtgaacaccagcaccctgttcgacgagctggagctggacccccccgagatcgagcccggcgtgctgaaggtgctgcgcaccgagaagcagtacctgggcgtgtacatctggaacatgcgcggcagcgacggcaccagcacctacgccaccttcctggtgacctggaagggcgacgaaaagacccgcaaccccacccccgccgtgaccccccagccccgcggcgccgagttccacatgtggaactaccacagccacgtgttcagcgtgggcgacaccttcagcctggccatgcacctgcagtacaagatccacgaggcccccttcgacctgctgctggagtggctgtacgtgcccatcgaccccacctgccagcccatgcgcctgtacagcacctgcctgtaccaccccaacgccccccagtgcctgagccacatgaacagcggctgcaccttcaccagcccccacctggcccagcgcgtggccagcaccgtgtaccagaactgcgagcacgccgacaactacaccgcctactgcctgggcatcagccacatggagcccagcttcggcctgatcctgcacgacggcggcaccaccctgaagttcgtggacacccccgagagcctgagcggcctgtacgtgttcgtggtgtacttcaacggccacgtggaggccgtggcctacaccgtggtgagcaccgtggaccacttcgtgaacgccatcgaggagcgcggcttcccccccaccgccggccagccccccgccaccaccaagcccaaggagatcacccccgtgaaccccggcaccagccccctgatccgctacgccgcctggaccggcggcctggccgccgtggtgctgctgtgcctggtgatcttcctgatctgcaccgccaagcgcatgcgcgtgaaggcctaccgcgtggacaagagcccctacaaccagagcatgtacgccgccggcctgcccgtggacgacttcgaggacagcgagagcaccgacaccgaggaggagttcggcaacgccatcggcggcagccacggcggcagcagctacaccgtgtacatcgacaagacccgc

SEQ ID NO: 19 - DNA, 1743 bp, synthetic construct
  source 1..1743: mol_type = other DNA
atgggcaccgtgaacaagcctgttgtgggcgtgctgatgggcttcggcatcatcacaggcaccctgcggatcaccaatcctgtgcgggctagcgtgctgagatacgacgacttccacatcgacgaggacaagctggacaccaacagcgtgtacgagccctactaccacagcgatcacgccgagtctagctgggtcaacagaggcgagagcagcagaaaggcctacgaccacaacagcccctacatctggccccggaacgactacgatggcttcctggaaaatgcccacgagcaccacggcgtgtacaatcaaggcagaggcatcgacagcggcgagagactgatgcagcctacacagatgagcgcccaagaggacctgggagatgataccggcatccacgtgatccccacactgaacggcgacgacagacacaagatcgtgaacgtggaccagcggcagtacggcgacgtgttcaagggcgacctgaatcctaagcctcagggccagcgcctgatcgaggtgtccgtggaggagaatcaccccttcacactgagagcccctatccagagaatctacggcgtgcgctataccgagacatggtcctttctgcccagcctgacatgtaccggggatgccgctcctgccatccagcacatttgcctgaagcacaccacctgtttccaggacgtggtggtggatgtggactgcgccgagaacaccaaagaggatcagctggccgagatcagctaccggttccagggaaagaaagaggccgaccagccttggatcgtggtcaacaccagcacactgttcgacgagctggaactggaccctcctgagattgaacccggggtgctgaaggtgctgagaaccgagaagcagtacctgggagtgtacatctggaacatgagaggcagcgacggcacctctacctacgccacctttctggtcacatggaagggcgacgagaaaacacggaaccccacaccagctgtgacccctcaacctagaggcgccgagtttcacatgtggaattaccacagccacgtgttcagcgtgggcgatacctttagcctggccatgcatctgcagtacaagatccacgaggcccctttcgacctgctgctggaatggctgtacgtgcccatcgatcctacctgccagcctatgcggctgtactccacctgtctgtatcaccccaacgctccccagtgcctgagccacatgaatagcggctgcaccttcacaagccctcacctggctcagcgagtggccagcacagtgtaccagaattgcgagcacgccgacaattacaccgcctactgtctgggcatcagccacatggaacctagcttcggcctgatcctgcacgatggcggcacaaccctgaagttcgtggatacccctgagagcctgagcggcctgtatgtgttcgtggtgtacttcaacggccacgtggaagccgtggcctacaccgtggtgtctaccgtggaccacttcgtgaacgccatcgaggaaagaggcttccctccaactgctggacagcctcctgccaccaccaagcctaaagaaatcacacccgtgaatcccggcacaagcccactgatcagatacgccgcttggacaggcggactggctgctgttgttctgctgtgcctggtcatcttcctgatctgcaccgccaagcggatgagagtgaaggcctacagagtggacaagagcccttacaaccagagcatgtac

SEQ ID NO: 20 - DNA, 1743 bp, synthetic construct
  source 1..1743: mol_type = other DNA
atgggcaccgtgaacaagcccgtggtgggcgtgctgatgggcttcggcatcatcaccggcaccctgcgcatcaccaaccccgtgcgcgccagcgtgctgcgctacgacgacttccacatcgacgaggacaagctggacaccaacagcgtgtacgagccctactaccacagcgaccacgccgagagcagctgggtgaaccgcggcgagagcagccgcaaggcctacgaccacaacagcccctacatctggccccgcaacgactacgacggcttcctggagaacgcccacgagcaccacggcgtgtacaaccagggccgcggcatcgacagcggcgagcgcctgatgcagcccacccagatgagcgcccaggaggacctgggcgacgacaccggcatccacgtgatccccaccctgaacggcgacgaccgccacaagatcgtgaacgtggaccagcgccagtacggcgacgtgttcaagggcgacctgaaccccaagccccagggccagcgcctgatcgaggtgagcgtggaggagaaccaccccttcaccctgcgcgcccccatccagcgcatctacggcgtgcgctacaccgagacctggagcttcctgcccagcctgacctgcaccggcgacgccgcccccgccatccagcacatctgcctgaagcacaccacctgcttccaggacgtggtggtggacgtggactgcgccgagaacaccaaggaggaccagctggccgagatcagctaccgcttccagggcaagaaggaggccgaccagccctggatcgtggtgaacaccagcaccctgttcgacgagctggagctggacccccccgagatcgagcccggcgtgctgaaggtgctgcgcaccgagaagcagtacctgggcgtgtacatctggaacatgcgcggcagcgacggcaccagcacctacgccaccttcctggtgacctggaagggcgacgaaaagacccgcaaccccacccccgccgtgaccccccagccccgcggcgccgagttccacatgtggaactaccacagccacgtgttcagcgtgggcgacaccttcagcctggccatgcacctgcagtacaagatccacgaggcccccttcgacctgctgctggagtggctgtacgtgcccatcgaccccacctgccagcccatgcgcctgtacagcacctgcctgtaccaccccaacgccccccagtgcctgagccacatgaacagcggctgcaccttcaccagcccccacctggcccagcgcgtggccagcaccgtgtaccagaactgcgagcacgccgacaactacaccgcctactgcctgggcatcagccacatggagcccagcttcggcctgatcctgcacgacggcggcaccaccctgaagttcgtggacacccccgagagcctgagcggcctgtacgtgttcgtggtgtacttcaacggccacgtggaggccgtggcctacaccgtggtgagcaccgtggaccacttcgtgaacgccatcgaggagcgcggcttcccccccaccgccggccagccccccgccaccaccaagcccaaggagatcacccccgtgaaccccggcaccagccccctgatccgctacgccgcctggaccggcggcctggccgccgtggtgctgctgtgcctggtgatcttcctgatctgcaccgccaagcgcatgcgcgtgaaggcctaccgcgtggacaagagcccctacaaccagagcatgtac

SEQ ID NO: 21 - DNA, 1743 bp, synthetic construct
  source 1..1743: mol_type = other DNA
atgggcaccgtgaacaagcccgtggtgggcgtgctgatgggcttcggcatcatcaccggcaccctgcgcatcaccaaccccgtgcgcgccagcgtgctgcgctacgacgacttccacatcgacgaggacaagctggacaccaacagcgtgtacgagccctactaccacagcgaccacgccgagagcagctgggtgaaccgcggcgagagcagccgcaaggcctacgaccacaacagcccctacatctggccccgcaacgactacgacggcttcctggagaacgcccacgagcaccacggcgtgtacaaccagggccgcggcatcgacagcggcgagcgcctgatgcagcccacccagatgagcgcccaggaggacctgggcgacgacaccggcatccacgtgatccccaccctgaacggcgacgaccgccacaagatcgtgaacgtggaccagcgccagtacggcgacgtgttcaagggcgacctgaaccccaagccccagggccagcgcctgatcgaggtgagcgtggaggagaaccaccccttcaccctgcgcgcccccatccagcgcatctacggcgtgcgctacaccgagacctggagcttcctgcccagcctgacctgcaccggcgacgccgcccccgccatccagcacatctgcctgaagcacaccacctgcttccaggacgtggtggtggacgtggactgcgccgagaacaccaaggaggaccagctggccgagatcagctaccgcttccagggcaagaaggaggccgaccagccctggatcgtggtgaacaccagcaccctgttcgacgagctggagctggacccccccgagatcgagcccggcgtgctgaaggtgctgcgcaccgagaagcagtacctgggcgtgtacatctggaacatgcgcggcagcgacggcaccagcacctacgccaccttcctggtgacctggaagggcgacgaaaagacccgcaaccccacccccgccgtgaccccccagccccgcggcgccgagttccacatgtggaactaccacagccacgtgttcagcgtgggcgacaccttcagcctggccatgcacctgcagtacaagatccacgaggcccccttcgacctgctgctggagtggctgtacgtgcccatcgaccccacctgccagcccatgcgcctgtacagcacctgcctgtaccaccccaacgccccccagtgcctgagccacatgaacagcggctgcaccttcaccagcccccacctggcccagcgcgtggccagcaccgtgtaccagaactgcgagcacgccgacaactacaccgcctactgcctgggcatcagccacatggagcccagcttcggcctgatcctgcacgacggcggcaccaccctgaagttcgtggacacccccgagagcctgagcggcctgtacgtgttcgtggtgtacttcaacggccacgtggaggccgtggcctacaccgtggtgagcaccgtggaccacttcgtgaacgccatcgaggagcgcggcttcccccccaccgccggccagccccccgccaccaccaagcccaaggagatcacccccgtgaaccccggcaccagccccctgatccgctacgccgcctggaccggcggcctggccgccgtggtgctgctgtgcctggtgattttcctaatatgcaccgccaagcgcatgcgcgtgaaggcctaccgcgtggacaagagcccctacaaccagagcatgtac

SEQ ID NO: 22 - DNA, 1614 bp, synthetic construct
  source 1..1614: mol_type = other DNA
atgggcaccgtgaacaagcctgttgtgggcgtgctgatgggcttcggcatcatcacaggcaccctgcggatcaccaatcctgtgcgggctagcgtgctgagatacgacgacttccacatcgacgaggacaagctggacaccaacagcgtgtacgagccctactaccacagcgatcacgccgagtctagctgggtcaacagaggcgagagcagcagaaaggcctacgaccacaacagcccctacatctggccccggaacgactacgatggcttcctggaaaatgcccacgagcaccacggcgtgtacaatcaaggcagaggcatcgacagcggcgagagactgatgcagcctacacagatgagcgcccaagaggacctgggagatgataccggcatccacgtgatccccacactgaacggcgacgacagacacaagatcgtgaacgtggaccagcggcagtacggcgacgtgttcaagggcgacctgaatcctaagcctcagggccagcgcctgatcgaggtgtccgtggaggagaatcaccccttcacactgagagcccctatccagagaatctacggcgtgcgctataccgagacatggtcctttctgcccagcctgacatgtaccggggatgccgctcctgccatccagcacatttgcctgaagcacaccacctgtttccaggacgtggtggtggatgtggactgcgccgagaacaccaaagaggatcagctggccgagatcagctaccggttccagggaaagaaagaggccgaccagccttggatcgtggtcaacaccagcacactgttcgacgagctggaactggaccctcctgagattgaacccggggtgctgaaggtgctgagaaccgagaagcagtacctgggagtgtacatctggaacatgagaggcagcgacggcacctctacctacgccacctttctggtcacatggaagggcgacgagaaaacacggaaccccacaccagctgtgacccctcaacctagaggcgccgagtttcacatgtggaattaccacagccacgtgttcagcgtgggcgatacctttagcctggccatgcatctgcagtacaagatccacgaggcccctttcgacctgctgctggaatggctgtacgtgcccatcgatcctacctgccagcctatgcggctgtactccacctgtctgtatcaccccaacgctccccagtgcctgagccacatgaatagcggctgcaccttcacaagccctcacctggctcagcgagtggccagcacagtgtaccagaattgcgagcacgccgacaattacaccgcctactgtctgggcatcagccacatggaacctagcttcggcctgatcctgcacgatggcggcacaaccctgaagttcgtggatacccctgagagcctgagcggcctgtatgtgttcgtggtgtacttcaacggccacgtggaagccgtggcctacaccgtggtgtctaccgtggaccacttcgtgaacgccatcgaggaaagaggcttccctccaactgctggacagcctcctgccaccaccaagcctaaagaaatcacacccgtgaatcccggcacaagcccactgatcagatac

SEQ ID NO: 23 - DNA, 1614 bp, synthetic construct
  source 1..1614: mol_type = other DNA
atgggcaccgtgaacaagcccgtggtgggcgtgctgatgggcttcggcatcatcaccggcaccctgcgcatcaccaaccccgtgcgcgccagcgtgctgcgctacgacgacttccacatcgacgaggacaagctggacaccaacagcgtgtacgagccctactaccacagcgaccacgccgagagcagctgggtgaaccgcggcgagagcagccgcaaggcctacgaccacaacagcccctacatctggccccgcaacgactacgacggcttcctggagaacgcccacgagcaccacggcgtgtacaaccagggccgcggcatcgacagcggcgagcgcctgatgcagcccacccagatgagcgcccaggaggacctgggcgacgacaccggcatccacgtgatccccaccctgaacggcgacgaccgccacaagatcgtgaacgtggaccagcgccagtacggcgacgtgttcaagggcgacctgaaccccaagccccagggccagcgcctgatcgaggtgagcgtggaggagaaccaccccttcaccctgcgcgcccccatccagcgcatctacggcgtgcgctacaccgagacctggagcttcctgcccagcctgacctgcaccggcgacgccgcccccgccatccagcacatctgcctgaagcacaccacctgcttccaggacgtggtggtggacgtggactgcgccgagaacaccaaggaggaccagctggccgagatcagctaccgcttccagggcaagaaggaggccgaccagccctggatcgtggtgaacaccagcaccctgttcgacgagctggagctggacccccccgagatcgagcccggcgtgctgaaggtgctgcgcaccgagaagcagtacctgggcgtgtacatctggaacatgcgcggcagcgacggcaccagcacctacgccaccttcctggtgacctggaagggcgacgaaaagacccgcaaccccacccccgccgtgaccccccagccccgcggcgccgagttccacatgtggaactaccacagccacgtgttcagcgtgggcgacaccttcagcctggccatgcacctgcagtacaagatccacgaggcccccttcgacctgctgctggagtggctgtacgtgcccatcgaccccacctgccagcccatgcgcctgtacagcacctgcctgtaccaccccaacgccccccagtgcctgagccacatgaacagcggctgcaccttcaccagcccccacctggcccagcgcgtggccagcaccgtgtaccagaactgcgagcacgccgacaactacaccgcctactgcctgggcatcagccacatggagcccagcttcggcctgatcctgcacgacggcggcaccaccctgaagttcgtggacacccccgagagcctgagcggcctgtacgtgttcgtggtgtacttcaacggccacgtggaggccgtggcctacaccgtggtgagcaccgtggaccacttcgtgaacgccatcgaggagcgcggcttcccccccaccgccggccagccccccgccaccaccaagcccaaggagatcacccccgtgaaccccggcaccagccccctgatccgctac

SEQ ID NO: 24 - DNA, 1824 bp, synthetic construct
  source 1..1824: mol_type = other DNA
atgggcaccgtgaacaagcctgttgtgggcgtgctgatgggcttcggcatcatcacaggcaccctgcggatcaccaatcctgtgcgggctagcgtgctgagatacgacgacttccacatcgacgaggacaagctggacaccaacagcgtgtacgagccctactaccacagcgatcacgccgagtctagctgggtcaacagaggcgagagcagcagaaaggcctacgaccacaacagcccctacatctggccccggaacgactacgatggcttcctggaaaatgcccacgagcaccacggcgtgtacaatcaaggcagaggcatcgacagcggcgagagactgatgcagcctacacagatgagcgcccaagaggacctgggagatgataccggcatccacgtgatccccacactgaacggcgacgacagacacaagatcgtgaacgtggaccagcggcagtacggcgacgtgttcaagggcgacctgaatcctaagcctcagggccagcgcctgatcgaggtgtccgtggaagagaatcaccccttcacactgagagcccctatccagagaatctacggcgtgcgctataccgagacatggtcctttctgcccagcctgacatgtaccggggatgccgctcctgccatccagcacatttgcctgaagcacaccacctgtttccaggacgtggtggtggatgtggactgcgccgagaacaccaaagaggatcagctggccgagatcagctaccggttccagggaaagaaagaggccgaccagccttggatcgtggtcaacaccagcacactgttcgacgagctggaactggaccctcctgagattgaacccggggtgctgaaggtgctgagaaccgagaagcagtacctgggagtgtacatctggaacatgagaggcagcgacggcacctctacctacgccacctttctggtcacatggaagggcgacgagaaaacacggaaccccacaccagctgtgacccctcaacctagaggcgccgagtttcacatgtggaattaccacagccacgtgttcagcgtgggcgatacctttagcctggccatgcatctgcagtacaagatccacgaggcccctttcgacctgctgctggaatggctgtacgtgcccatcgatcctacctgccagcctatgcggctgtactccacctgtctgtatcaccccaacgctccccagtgcctgagccacatgaatagcggctgcaccttcacaagccctcacctggctcagcgagtggccagcacagtgtaccagaattgcgagcacgccgacaattacaccgcctactgtctgggcatcagccacatggaacctagcttcggcctgatcctgcacgatggcggcacaaccctgaagttcgtggatacccctgagagcctgagcggcctgtatgtgttcgtggtgtacttcaacggccacgtggaagccgtggcctacaccgtggtgtctaccgtggaccacttcgtgaacgccatcgaggaaagaggcttccctccaactgctggacagcctcctgccaccaccaagcctaaagaaatcacacccgtgaatcccggcacaagcccactgatcagatacgccgcttggacaggcggactggctgctgttgttctgctgtgcctggtcatcttcctgatctgcaccgccaagcggatgagagtgaaggcctacagagtggacaagagcccttacaaccagagcatgtactacgccggcctgcctgtgggaaatgccatcggaggatctcacggcggcagcagctataccgtgtacatcgacaagacccgg

SEQ ID NO: 25 - DNA, 1824 bp, synthetic construct
  source 1..1824: mol_type = other DNA
atgggcaccgtgaacaagcctgttgtgggcgtgctgatgggcttcggcatcatcacaggcaccctgcggatcaccaatcctgtgcgggctagcgtgctgagatacgacgacttccacatcgacgaggacaagctggacaccaacagcgtgtacgagccctactaccacagcgatcacgccgagtctagctgggtcaacagaggcgagagcagcagaaaggcctacgaccacaacagcccctacatctggccccggaacgactacgatggcttcctggaaaatgcccacgagcaccacggcgtgtacaatcaaggcagaggcatcgacagcggcgagagactgatgcagcctacacagatgagcgcccaagaggacctgggagatgataccggcatccacgtgatccccacactgaacggcgacgacagacacaagatcgtgaacgtggaccagcggcagtacggcgacgtgttcaagggcgacctgaatcctaagcctcagggccagcgcctgatcgaggtgtccgtggaagagaatcaccccttcacactgagagcccctatccagagaatctacggcgtgcgctataccgagacatggtcctttctgcccagcctgacatgtaccggggatgccgctcctgccatccagcacatttgcctgaagcacaccacctgtttccaggacgtggtggtggatgtggactgcgccgagaacaccaaagaggatcagctggccgagatcagctaccggttccagggaaagaaagaggccgaccagccttggatcgtggtcaacaccagcacactgttcgacgagctggaactggaccctcctgagattgaacccggggtgctgaaggtgctgagaaccgagaagcagtacctgggagtgtacatctggaacatgagaggcagcgacggcacctctacctacgccacctttctggtcacatggaagggcgacgagaaaacacggaaccccacaccagctgtgacccctcaacctagaggcgccgagtttcacatgtggaattaccacagccacgtgttcagcgtgggcgatacctttagcctggccatgcatctgcagtacaagatccacgaggcccctttcgacctgctgctggaatggctgtacgtgcccatcgatcctacctgccagcctatgcggctgtactccacctgtctgtatcaccccaacgctccccagtgcctgagccacatgaatagcggctgcaccttcacaagccctcacctggctcagcgagtggccagcacagtgtaccagaattgcgagcacgccgacaattacaccgcctactgtctgggcatcagccacatggaacctagcttcggcctgatcctgcacgatggcggcacaaccctgaagttcgtggatacccctgagagcctgagcggcctgtatgtgttcgtggtgtacttcaacggccacgtggaagccgtggcctacaccgtggtgtctaccgtggaccacttcgtgaacgccatcgaggaaagaggcttccctccaactgctggacagcctcctgccaccaccaagcctaaagaaatcacacccgtgaatcccggcacaagcccactgatcagatacgccgcttggacaggcggactggctgctgttgttctgctgtgcctggtcatcttcctgatctgcaccgccaagcggatgagagtgaaggccgccagagtggacaagagcccttacaaccagagcatgtactacgccggcctgcctgtgggaaatgccatcggaggatctcacggcggcagcagctataccgtgtacatcgacaagacccgg

SEQ ID NO: 26 - DNA, 1824 bp, synthetic construct
  source 1..1824: mol_type = other DNA
atgggcaccgtgaacaagcccgtggtgggcgtgctgatgggcttcggcatcatcaccggcaccctgcgcatcaccaaccccgtgcgcgccagcgtgctgcgctacgacgacttccacatcgacgaggacaagctggacaccaacagcgtgtacgagccctactaccacagcgaccacgccgagagcagctgggtgaaccgcggcgagagcagccgcaaggcctacgaccacaacagcccctacatctggccccgcaacgactacgacggcttcctggagaacgcccacgagcaccacggcgtgtacaaccagggccgcggcatcgacagcggcgagcgcctgatgcagcccacccagatgagcgcccaggaggacctgggcgacgacaccggcatccacgtgatccccaccctgaacggcgacgaccgccacaagatcgtgaacgtggaccagcgccagtacggcgacgtgttcaagggcgacctgaaccccaagccccagggccagcgcctgatcgaggtgagcgtggaggagaaccaccccttcaccctgcgcgcccccatccagcgcatctacggcgtgcgctacaccgagacctggagcttcctgcccagcctgacctgcaccggcgacgccgcccccgccatccagcacatctgcctgaagcacaccacctgcttccaggacgtggtggtggacgtggactgcgccgagaacaccaaggaggaccagctggccgagatcagctaccgcttccagggcaagaaggaggccgaccagccctggatcgtggtgaacaccagcaccctgttcgacgagctggagctggacccccccgagatcgagcccggcgtgctgaaggtgctgcgcaccgagaagcagtacctgggcgtgtacatctggaacatgcgcggcagcgacggcaccagcacctacgccaccttcctggtgacctggaagggcgacgaaaagacccgcaaccccacccccgccgtgaccccccagccccgcggcgccgagttccacatgtggaactaccacagccacgtgttcagcgtgggcgacaccttcagcctggccatgcacctgcagtacaagatccacgaggcccccttcgacctgctgctggagtggctgtacgtgcccatcgaccccacctgccagcccatgcgcctgtacagcacctgcctgtaccaccccaacgccccccagtgcctgagccacatgaacagcggctgcaccttcaccagcccccacctggcccagcgcgtggccagcaccgtgtaccagaactgcgagcacgccgacaactacaccgcctactgcctgggcatcagccacatggagcccagcttcggcctgatcctgcacgacggcggcaccaccctgaagttcgtggacacccccgagagcctgagcggcctgtacgtgttcgtggtgtacttcaacggccacgtggaggccgtggcctacaccgtggtgagcaccgtggaccacttcgtgaacgccatcgaggagcgcggcttcccccccaccgccggccagccccccgccaccaccaagcccaaggagatcacccccgtgaaccccggcaccagccccctgatccgctacgccgcctggaccggcggcctggccgccgtggtgctgctgtgcctggtgatcttcctgatctgcaccgccaagcgcatgcgcgtgaaggccgcccgcgtggacaagagcccctacaaccagagcatgtactacgccggcctgcccgtgggcaacgccatcggcggcagccacggcggcagcagctacaccgtgtacatcgacaagacccgc

SEQ ID NO: 27 - DNA, 1719 bp, synthetic construct
  source 1..1719: mol_type = other DNA
atgggcaccgtgaacaagcctgttgtgggcgtgctgatgggcttcggcatcatcacaggcaccctgcggatcaccaatcctgtgcgggctagcgtgctgagatacgacgacttccacatcgacgaggacaagctggacaccaacagcgtgtacgagccctactaccacagcgatcacgccgagtctagctgggtcaacagaggcgagagcagcagaaaggcctacgaccacaacagcccctacatctggccccggaacgactacgatggcttcctggaaaatgcccacgagcaccacggcgtgtacaatcaaggcagaggcatcgacagcggcgagagactgatgcagcctacacagatgagcgcccaagaggacctgggagatgataccggcatccacgtgatccccacactgaacggcgacgacagacacaagatcgtgaacgtggaccagcggcagtacggcgacgtgttcaagggcgacctgaatcctaagcctcagggccagcgcctgatcgaggtgtccgtggaggagaatcaccccttcacactgagagcccctatccagagaatctacggcgtgcgctataccgagacatggtcctttctgcccagcctgacatgtaccggggatgccgctcctgccatccagcacatttgcctgaagcacaccacctgtttccaggacgtggtggtggatgtggactgcgccgagaacaccaaagaggatcagctggccgagatcagctaccggttccagggaaagaaagaggccgaccagccttggatcgtggtcaacaccagcacactgttcgacgagctggaactggaccctcctgagattgaacccggggtgctgaaggtgctgagaaccgagaagcagtacctgggagtgtacatctggaacatgagaggcagcgacggcacctctacctacgccacctttctggtcacatggaagggcgacgagaaaacacggaaccccacaccagctgtgacccctcaacctagaggcgccgagtttcacatgtggaattaccacagccacgtgttcagcgtgggcgatacctttagcctggccatgcatctgcagtacaagatccacgaggcccctttcgacctgctgctggaatggctgtacgtgcccatcgatcctacctgccagcctatgcggctgtactccacctgtctgtatcaccccaacgctccccagtgcctgagccacatgaatagcggctgcaccttcacaagccctcacctggctcagcgagtggccagcacagtgtaccagaattgcgagcacgccgacaattacaccgcctactgtctgggcatcagccacatggaacctagcttcggcctgatcctgcacgatggcggcacaaccctgaagttcgtggatacccctgagagcctgagcggcctgtatgtgttcgtggtgtacttcaacggccacgtggaagccgtggcctacaccgtggtgtctaccgtggaccacttcgtgaacgccatcgaggaaagaggcttccctccaactgctggacagcctcctgccaccaccaagcctaaagaaatcacacccgtgaatcccggcacaagcccactgatcagatacgccgcttggacaggcggactggctgctgttgttctgctgtgcctggtcatcttcctgatctgcaccgccaagcggatgagagtgaaggccgccagagtggacaag

SEQ ID NO: 28 - DNA, 1719 bp, synthetic construct
  source 1..1719: mol_type = other DNA
atgggcaccgtgaacaagcccgtggtgggcgtgctgatgggcttcggcatcatcaccggcaccctgcgcatcaccaaccccgtgcgcgccagcgtgctgcgctacgacgacttccacatcgacgaggacaagctggacaccaacagcgtgtacgagccctactaccacagcgaccacgccgagagcagctgggtgaaccgcggcgagagcagccgcaaggcctacgaccacaacagcccctacatctggccccgcaacgactacgacggcttcctggagaacgcccacgagcaccacggcgtgtacaaccagggccgcggcatcgacagcggcgagcgcctgatgcagcccacccagatgagcgcccaggaggacctgggcgacgacaccggcatccacgtgatccccaccctgaacggcgacgaccgccacaagatcgtgaacgtggaccagcgccagtacggcgacgtgttcaagggcgacctgaaccccaagccccagggccagcgcctgatcgaggtgagcgtggaggagaaccaccccttcaccctgcgcgcccccatccagcgcatctacggcgtgcgctacaccgagacctggagcttcctgcccagcctgacctgcaccggcgacgccgcccccgccatccagcacatctgcctgaagcacaccacctgcttccaggacgtggtggtggacgtggactgcgccgagaacaccaaggaggaccagctggccgagatcagctaccgcttccagggcaagaaggaggccgaccagccctggatcgtggtgaacaccagcaccctgttcgacgagctggagctggacccccccgagatcgagcccggcgtgctgaaggtgctgcgcaccgagaagcagtacctgggcgtgtacatctggaacatgcgcggcagcgacggcaccagcacctacgccaccttcctggtgacctggaagggcgacgaaaagacccgcaaccccacccccgccgtgaccccccagccccgcggcgccgagttccacatgtggaactaccacagccacgtgttcagcgtgggcgacaccttcagcctggccatgcacctgcagtacaagatccacgaggcccccttcgacctgctgctggagtggctgtacgtgcccatcgaccccacctgccagcccatgcgcctgtacagcacctgcctgtaccaccccaacgccccccagtgcctgagccacatgaacagcggctgcaccttcaccagcccccacctggcccagcgcgtggccagcaccgtgtaccagaactgcgagcacgccgacaactacaccgcctactgcctgggcatcagccacatggagcccagcttcggcctgatcctgcacgacggcggcaccaccctgaagttcgtggacacccccgagagcctgagcggcctgtacgtgttcgtggtgtacttcaacggccacgtggaggccgtggcctacaccgtggtgagcaccgtggaccacttcgtgaacgccatcgaggagcgcggcttcccccccaccgccggccagccccccgccaccaccaagcccaaggagatcacccccgtgaaccccggcaccagccccctgatccgctacgccgcctggaccggcggcctggccgccgtggtgctgctgtgcctggtgatcttcctgatctgcaccgccaagcgcatgcgcgtgaaggccgcccgcgtggacaag

SEQ ID NO: 29 - DNA, 1719 bp, synthetic construct
  source 1..1719: mol_type = other DNA
atgggcaccgtgaacaagcccgtcgtgggcgtgctgatgggcttcggcatcatcaccggcaccctgcggatcaccaatcctgtgcgggccagcgtgctgagatacgacgacttccacatcgacgaggacaagctggacaccaacagcgtgtacgagccctactaccacagcgaccacgccgagagcagctgggtcaacagaggcgagtccagccggaaggcctacgaccacaacagcccctacatctggccccggaacgactacgacggcttcctggaaaatgcccacgagcaccacggcgtgtacaaccagggcagaggcatcgacagcggcgagagactgatgcagcccacccagatgagcgcccaggaagatctgggcgacgacaccggcatccacgtgatccctaccctgaacggcgacgaccggcacaagatcgtgaacgtggaccagcggcagtacggcgacgtgttcaagggcgacctgaaccccaagccccagggacagcggctgattgaggtgtccgtggaagagaaccaccccttcaccctgagagcccctatccagcggatctacggcgtgcgctataccgagacttggagcttcctgcccagcctgacctgtactggcgacgccgctcctgccatccagcacatctgcctgaagcacaccacctgtttccaggacgtggtggtggacgtggactgcgccgagaacaccaaagaggaccagctggccgagatcagctaccggttccagggcaagaaagaggccgaccagccctggatcgtcgtgaacaccagcaccctgttcgacgagctggaactggaccctcccgagatcgaacccggggtgctgaaggtgctgcggaccgagaagcagtacctgggagtgtacatctggaacatgcggggcagcgacggcacctctacctacgccaccttcctcgtgacctggaagggcgacgagaaaacccggaaccctacccctgccgtgacccctcagcctagaggcgccgagtttcacatgtggaattaccacagccacgtgttcagcgtgggcgacaccttctccctggccatgcatctgcagtacaagatccacgaggcccctttcgacctgctgctggaatggctgtacgtgcccatcgaccctacctgccagcccatgcggctgtactccacctgtctgtaccaccccaacgcccctcagtgcctgagccacatgaatagcggctgcaccttcaccagccctcacctggctcagagggtggccagcaccgtgtaccagaattgcgagcacgccgacaactacaccgcctactgcctgggcatcagccacatggaacccagcttcggcctgatcctgcacgatggcggcaccaccctgaagttcgtggacacccctgagtccctgagcggcctgtacgtgttcgtggtgtacttcaacggccacgtggaagccgtggcctacaccgtggtgtccaccgtggaccacttcgtgaacgccatcgaggaacggggcttccctccaactgctggacagcctcctgccaccaccaagcccaaagaaatcacccctgtgaaccccggcaccagcccactgctgcgctatgctgcttggacaggcggactggctgctgtggtgctgctgtgcctcgtgattttcctgatctgcaccgccaagcggatgagagtgaaggccgccagagtggacaag

SEQ ID NO: 30 - DNA, 1869 bp, synthetic construct
  source 1..1869: mol_type = other DNA
atgggcaccgtgaacaagcctgttgtgggcgtgctgatgggcttcggcatcatcacaggcaccctgcggatcaccaatcctgtgcgggctagcgtgctgagatacgacgacttccacatcgacgaggacaagctggacaccaacagcgtgtacgagccctactaccacagcgatcacgccgagtctagctgggtcaacagaggcgagagcagcagaaaggcctacgaccacaacagcccctacatctggccccggaacgactacgatggcttcctggaaaatgcccacgagcaccacggcgtgtacaatcaaggcagaggcatcgacagcggcgagagactgatgcagcctacacagatgagcgcccaagaggacctgggagatgataccggcatccacgtgatccccacactgaacggcgacgacagacacaagatcgtgaacgtggaccagcggcagtacggcgacgtgttcaagggcgacctgaatcctaagcctcagggccagcgcctgatcgaggtgtccgtggaggagaatcaccccttcacactgagagcccctatccagagaatctacggcgtgcgctataccgagacatggtcctttctgcccagcctgacatgtaccggggatgccgctcctgccatccagcacatttgcctgaagcacaccacctgtttccaggacgtggtggtggatgtggactgcgccgagaacaccaaagaggatcagctggccgagatcagctaccggttccagggaaagaaagaggccgaccagccttggatcgtggtcaacaccagcacactgttcgacgagctggaactggaccctcctgagattgaacccggggtgctgaaggtgctgagaaccgagaagcagtacctgggagtgtacatctggaacatgagaggcagcgacggcacctctacctacgccacctttctggtcacatggaagggcgacgagaaaacacggaaccccacaccagctgtgacccctcaacctagaggcgccgagtttcacatgtggaattaccacagccacgtgttcagcgtgggcgatacctttagcctggccatgcatctgcagtacaagatccacgaggcccctttcgacctgctgctggaatggctgtacgtgcccatcgatcctacctgccagcctatgcggctgtactccacctgtctgtatcaccccaacgctccccagtgcctgagccacatgaatagcggctgcaccttcacaagccctcacctggctcagcgagtggccagcacagtgtaccagaattgcgagcacgccgacaattacaccgcctactgtctgggcatcagccacatggaacctagcttcggcctgatcctgcacgatggcggcacaaccctgaagttcgtggatacccctgagagcctgagcggcctgtatgtgttcgtggtgtacttcaacggccacgtggaagccgtggcctacaccgtggtgtctaccgtggaccacttcgtgaacgccatcgaggaaagaggcttccctccaactgctggacagcctcctgccaccaccaagcctaaagaaatcacacccgtgaatcccggcacaagcccactgatcagatacgccgcttggacaggcggactggctgctgttgttctgctgtgcctggtcatcttcctgatctgcaccgccaagcggatgagagtgaaggccgccagagtggacaagagcccttacaaccagagcatgtacgccgccggcctgcctgtggacgacttcgaggatagcgagagcaccgacaccgaggaggagttcggcaacgccattggaggatctcacggcggcagcagctataccgtgtacatcgacaagacccgg

SEQ ID NO: 31 - DNA, 1869 bp, synthetic construct
  source 1..1869: mol_type = other DNA
atgggcaccgtgaacaagcccgtggtgggcgtgctgatgggcttcggcatcatcaccggcaccctgcgcatcaccaaccccgtgcgcgccagcgtgctgcgctacgacgacttccacatcgacgaggacaagctggacaccaacagcgtgtacgagccctactaccacagcgaccacgccgagagcagctgggtgaaccgcggcgagagcagccgcaaggcctacgaccacaacagcccctacatctggccccgcaacgactacgacggcttcctggagaacgcccacgagcaccacggcgtgtacaaccagggccgcggcatcgacagcggcgagcgcctgatgcagcccacccagatgagcgcccaggaggacctgggcgacgacaccggcatccacgtgatccccaccctgaacggcgacgaccgccacaagatcgtgaacgtggaccagcgccagtacggcgacgtgttcaagggcgacctgaaccccaagccccagggccagcgcctgatcgaggtgagcgtggaggagaaccaccccttcaccctgcgcgcccccatccagcgcatctacggcgtgcgctacaccgagacctggagcttcctgcccagcctgacctgcaccggcgacgccgcccccgccatccagcacatctgcctgaagcacaccacctgcttccaggacgtggtggtggacgtggactgcgccgagaacaccaaggaggaccagctggccgagatcagctaccgcttccagggcaagaaggaggccgaccagccctggatcgtggtgaacaccagcaccctgttcgacgagctggagctggacccccccgagatcgagcccggcgtgctgaaggtgctgcgcaccgagaagcagtacctgggcgtgtacatctggaacatgcgcggcagcgacggcaccagcacctacgccaccttcctggtgacctggaagggcgacgaaaagacccgcaaccccacccccgccgtgaccccccagccccgcggcgccgagttccacatgtggaactaccacagccacgtgttcagcgtgggcgacaccttcagcctggccatgcacctgcagtacaagatccacgaggcccccttcgacctgctgctggagtggctgtacgtgcccatcgaccccacctgccagcccatgcgcctgtacagcacctgcctgtaccaccccaacgccccccagtgcctgagccacatgaacagcggctgcaccttcaccagcccccacctggcccagcgcgtggccagcaccgtgtaccagaactgcgagcacgccgacaactacaccgcctactgcctgggcatcagccacatggagcccagcttcggcctgatcctgcacgacggcggcaccaccctgaagttcgtggacacccccgagagcctgagcggcctgtacgtgttcgtggtgtacttcaacggccacgtggaggccgtggcctacaccgtggtgagcaccgtggaccacttcgtgaacgccatcgaggagcgcggcttcccccccaccgccggccagccccccgccaccaccaagcccaaggagatcacccccgtgaaccccggcaccagccccctgatccgctacgccgcctggaccggcggcctggccgccgtggtgctgctgtgcctggtgatcttcctgatctgcaccgccaagcgcatgcgcgtgaaggccgcccgcgtggacaagagcccctacaaccagagcatgtacgccgccggcctgcccgtggacgacttcgaggacagcgagagcaccgacaccgaggaggagttcggcaacgccatcggcggcagccacggcggcagcagctacaccgtgtacatcgacaagacccgc

SEQ ID NO: 32 - DNA, 1743 bp, synthetic construct
  source 1..1743: mol_type = other DNA
atgggcaccgtgaacaagcctgttgtgggcgtgctgatgggcttcggcatcatcacaggcaccctgcggatcaccaatcctgtgcgggctagcgtgctgagatacgacgacttccacatcgacgaggacaagctggacaccaacagcgtgtacgagccctactaccacagcgatcacgccgagtctagctgggtcaacagaggcgagagcagcagaaaggcctacgaccacaacagcccctacatctggccccggaacgactacgatggcttcctggaaaatgcccacgagcaccacggcgtgtacaatcaaggcagaggcatcgacagcggcgagagactgatgcagcctacacagatgagcgcccaagaggacctgggagatgataccggcatccacgtgatccccacactgaacggcgacgacagacacaagatcgtgaacgtggaccagcggcagtacggcgacgtgttcaagggcgacctgaatcctaagcctcagggccagcgcctgatcgaggtgtccgtggaggagaatcaccccttcacactgagagcccctatccagagaatctacggcgtgcgctataccgagacatggtcctttctgcccagcctgacatgtaccggggatgccgctcctgccatccagcacatttgcctgaagcacaccacctgtttccaggacgtggtggtggatgtggactgcgccgagaacaccaaagaggatcagctggccgagatcagctaccggttccagggaaagaaagaggccgaccagccttggatcgtggtcaacaccagcacactgttcgacgagctggaactggaccctcctgagattgaacccggggtgctgaaggtgctgagaaccgagaagcagtacctgggagtgtacatctggaacatgagaggcagcgacggcacctctacctacgccacctttctggtcacatggaagggcgacgagaaaacacggaaccccacaccagctgtgacccctcaacctagaggcgccgagtttcacatgtggaattaccacagccacgtgttcagcgtgggcgatacctttagcctggccatgcatctgcagtacaagatccacgaggcccctttcgacctgctgctggaatggctgtacgtgcccatcgatcctacctgccagcctatgcggctgtactccacctgtctgtatcaccccaacgctccccagtgcctgagccacatgaatagcggctgcaccttcacaagccctcacctggctcagcgagtggccagcacagtgtaccagaattgcgagcacgccgacaattacaccgcctactgtctgggcatcagccacatggaacctagcttcggcctgatcctgcacgatggcggcacaaccctgaagttcgtggatacccctgagagcctgagcggcctgtatgtgttcgtggtgtacttcaacggccacgtggaagccgtggcctacaccgtggtgtctaccgtggaccacttcgtgaacgccatcgaggaaagaggcttccctccaactgctggacagcctcctgccaccaccaagcctaaagaaatcacacccgtgaatcccggcacaagcccactgatcagatacgccgcttggacaggcggactggctgctgttgttctgctgtgcctggtcatcttcctgatctgcaccgccaagcggatgagagtgaaggccgccagagtggacaagagcccttacaaccagagcatgtac

SEQ ID NO: 33 - DNA, 1743 bp, synthetic construct
  source 1..1743: mol_type = other DNA
atgggcaccgtgaacaagcccgtggtgggcgtgctgatgggcttcggcatcatcaccggcaccctgcgcatcaccaaccccgtgcgcgccagcgtgctgcgctacgacgacttccacatcgacgaggacaagctggacaccaacagcgtgtacgagccctactaccacagcgaccacgccgagagcagctgggtgaaccgcggcgagagcagccgcaaggcctacgaccacaacagcccctacatctggccccgcaacgactacgacggcttcctggagaacgcccacgagcaccacggcgtgtacaaccagggccgcggcatcgacagcggcgagcgcctgatgcagcccacccagatgagcgcccaggaggacctgggcgacgacaccggcatccacgtgatccccaccctgaacggcgacgaccgccacaagatcgtgaacgtggaccagcgccagtacggcgacgtgttcaagggcgacctgaaccccaagccccagggccagcgcctgatcgaggtgagcgtggaggagaaccaccccttcaccctgcgcgcccccatccagcgcatctacggcgtgcgctacaccgagacctggagcttcctgcccagcctgacctgcaccggcgacgccgcccccgccatccagcacatctgcctgaagcacaccacctgcttccaggacgtggtggtggacgtggactgcgccgagaacaccaaggaggaccagctggccgagatcagctaccgcttccagggcaagaaggaggccgaccagccctggatcgtggtgaacaccagcaccctgttcgacgagctggagctggacccccccgagatcgagcccggcgtgctgaaggtgctgcgcaccgagaagcagtacctgggcgtgtacatctggaacatgcgcggcagcgacggcaccagcacctacgccaccttcctggtgacctggaagggcgacgaaaagacccgcaaccccacccccgccgtgaccccccagccccgcggcgccgagttccacatgtggaactaccacagccacgtgttcagcgtgggcgacaccttcagcctggccatgcacctgcagtacaagatccacgaggcccccttcgacctgctgctggagtggctgtacgtgcccatcgaccccacctgccagcccatgcgcctgtacagcacctgcctgtaccaccccaacgccccccagtgcctgagccacatgaacagcggctgcaccttcaccagcccccacctggcccagcgcgtggccagcaccgtgtaccagaactgcgagcacgccgacaactacaccgcctactgcctgggcatcagccacatggagcccagcttcggcctgatcctgcacgacggcggcaccaccctgaagttcgtggacacccccgagagcctgagcggcctgtacgtgttcgtggtgtacttcaacggccacgtggaggccgtggcctacaccgtggtgagcaccgtggaccacttcgtgaacgccatcgaggagcgcggcttcccccccaccgccggccagccccccgccaccaccaagcccaaggagatcacccccgtgaaccccggcaccagccccctgatccgctacgccgcctggaccggcggcctggccgccgtggtgctgctgtgcctggtgatcttcctgatctgcaccgccaagcgcatgcgcgtgaaggccgcccgcgtggacaagagcccctacaaccagagcatgtac

SEQ ID NO: 34 - DNA, 4331 bp, synthetic construct
  source 1..4331: mol_type = other DNA
atgggcaccgtgaacaagcctgttgtgggcgtgctgatgggcttcggcatcatcacaggcaccctgcggatcaccaatcctgtgcgggctagcgtgctgagatacgacgacttccacatcgacgaggacaagctggacaccaacagcgtgtacgagccctactaccacagcgatcacgccgagtctagctgggtcaacagaggcgagagcagcagaaaggcctacgaccacaacagcccctacatctggccccggaacgactacgatggcttcctggaaaatgcccacgagcaccacggcgtgtacaatcaaggcagaggcatcgacagcggcgagagactgatgcagcctacacagatgagcgcccaagaggacctgggagatgataccggcatccacgtgatccccacactgaacggcgacgacagacacaagatcgtgaacgtggaccagcggcagtacggcgacgtgttcaagggcgacctgaatcctaagcctcagggccagcgcctgatcgaggtgtccgtggaggagaatcaccccttcacactgagagcccctatccagagaatctacggcgtgcgctataccgagacatggtcctttctgcccagcctgacatgtaccggggatgccgctcctgccatccagcacatttgcctgaagcacaccacctgtttccaggacgtggtggtggatgtggactgcgccgagaacaccaaagaggatcagctggccgagatcagctaccggttccagggaaagaaagaggccgaccagccttggatcgtggtcaacaccagcacactgttcgacgagctggaactggaccctcctgagattgaacccggggtgctgaaggtgctgagaaccgagaagcagtacctgggagtgtacatctggaacatgagaggcagcgacggcacctctacctacgccacctttctggtcacatggaagggcgacgagaaaacacggaaccccacaccagctgtgacccctcaacctagaggcgccgagtttcacatgtggaattaccacagccacgtgttcagcgtgggcgatacctttagcctggccatgcatctgcagtacaagatccacgaggcccctttcgacctgctgctggaatggctgtacgtgcccatcgatcctacctgccagcctatgcggctgtactccacctgtctgtatcaccccaacgctccccagtgcctgagccacatgaatagcggctgcaccttcacaagccctcacctggctcagcgagtggccagcacagtgtaccagaattgcgagcacgccgacaattacaccgcctactgtctgggcatcagccacatggaacctagcttcggcctgatcctgcacgatggcggcacaaccctgaagttcgtggatacccctgagagcctgagcggcctgtatgtgttcgtggtgtacttcaacggccacgtggaagccgtggcctacaccgtggtgtctaccgtggaccacttcgtgaacgccatcgaggaaagaggcttccctccaactgctggacagcctcctgccaccaccaagcctaaagaaatcacacccgtgaatcccggcacaagcccactgatcagatacgccgcttggacaggcggactggctgctgttgttctgctgtgcctggtcatcttcctgatctgcaccgccaagcggatgagagtgaaggcctacagagtggacaagagcccttacaaccagagcatgtactacgccggcctgcctgtggacgacttcgaggatagcgagagcaccgacaccgaggaggagttcggcaacgccattggaggatctcacggcggcagcagctataccgtgtacatcgacaagacccggtgatgacccctctccctcccccccccctaacgttactggccgaagccgcttggaataaggccggtgtgcgtttgtctatatgttattttccaccatattgccgtcttttggcaatgtgagggcccggaaacctggccctgtcttcttgacgagcattcctaggggtctttcccctctcgccaaaggaatgcaaggtctgttgaatgtcgtgaaggaagcagttcctctggaagcttcttgaagacaaacaacgtctgtagcgaccctttgcaggcagcggaaccccccacctggcgacaggtgcctctgcggccaaaagccacgtgtataagatacacctgcaaaggcggcacaaccccagtgccacgttgtgagttggatagttgtggaaagagtcaaatggctctcctcaagcgtattcaacaaggggctgaaggatgcccagaaggtaccccattgtatgggatctgatctggggcctcggtgcacatgctttacatgtgtttagtcgaggttaaaaaaacgtctaggccccccgaaccacggggacgtggttttcctttgaaaaacacgatgataagcttgccacaaccatgggcactgtcaacaagccggttgttggggtgctcatggggttcggcatcatcaccggtacactcaggattacaaatcctgtacgcgcgagtgtcttgcggtacgacgatttccatatcgatgaagataagctcgacacgaactccgtgtacgagccttattatcattctgatcatgcggagtcgtcatgggtgaatcggggtgagtcttccaggaaggcttatgatcataacagcccatacatatggcctcgtaatgattatgacggcttcctggagaacgcccatgagcaccacggtgtctataaccaaggtcgagggatagactctggggaaaggctgatgcagcctacccagatgtcggcacaggaggacctaggggatgacactggcatccatgtcatccccacgctcaatggcgacgaccgccataagatcgtgaatgtggaccagcggcagtacggggatgtcttcaaaggagaccttaaccctaagccccaagggcagcggttgatagaggtctccgttgaagaaaatcatccctttactctgcgggctcccattcaacgcatctatggggtccgctatactgagacgtggtccttcttgccgtccctgacctgtacaggtgatgctgcccccgctattcagcatatatgcctcaagcatactacttgctttcaggacgttgtggtcgatgtcgattgcgctgagaacacgaaggaggatcagttagctgagatttcctatcggttccagggtaaaaaggaggccgatcagccgtggatagtggtgaacacttcaaccctattcgacgagcttgaattggaccctcccgagatcgaacccggcgtcctgaaggttctgagaacagagaagcagtatcttggggtatatatctggaatatgcggggcagcgacggcacgtccacctatgcaaccttcttggtgacatggaagggcgatgagaagacacgtaaccccactccggctgtgacaccacagccgcgaggcgctgagttccacatgtggaattatcattcccatgtattcagtgttggggatacgttctctctggccatgcacctccagtacaagatacacgaggcgccctttgatcttttactggagtggctgtatgtgccaatcgatcctacatgtcaaccgatgaggttgtattccacttgtttatatcacccaaacgctcctcagtgtttgagtcatatgaacagtggatgtacctttacatcaccccatctggcacagagggtggcctccacggtctatcagaattgtgaacacgcagacaactatacagcctactgtctggggatcagccacatggagcctagcttcgggctgatactccacgacggtgggaccaccttaaagttcgtggatactcccgagtctttgagtggtctgtatgtgtttgtggtttattttaatggacacgtggaggcggtggcgtacacggtggtcagcacagttgaccacttcgtgaatgccatcgaggagcgggggttcccgcctacggctgggcaaccacccgctaccacgaagcccaaggagattactcctgtgaatcctgggacatcacctcttatcaggtacgccgcgtggaccggtggccttgccgcagttgttcttctgtgtctggtgattttcttgatctgcaccgcaaagcggatgcgggtcaaggcttaccgggtcgacaagagtccttacaatcagagtatgtactacgcgggcctcccggtagacgactttgaggactctgagtcgaccgacacagaagaagaattcggcaacgccatcggggggagccatggtggctcctcctacacggtgtatattgataagaccagg

SEQ ID NO: 35 - DNA, 1869 bp, synthetic construct
  source 1..1869: mol_type = other DNA
atgggcaccgtgaacaagcctgttgtgggcgtgctgatgggcttcggcatcatcacaggcaccctgcggatcaccaatcctgtgcgggctagcgtgctgagatacgacgacttccacatcgacgaggacaagctggacaccaacagcgtgtacgagccctactaccacagcgatcacgccgagtctagctgggtcaacagaggcgagagcagcagaaaggcctacgaccacaacagcccctacatctggccccggaacgactacgatggcttcctggaaaatgcccacgagcaccacggcgtgtacaatcaaggcagaggcatcgacagcggcgagagactgatgcagcctacacagatgagcgcccaagaggacctgggagatgataccggcatccacgtgatccccacactgaacggcgacgacagacacaagatcgtgaacgtggaccagcggcagtacggcgacgtgttcaagggcgacctgaatcctaagcctcagggccagcgcctgatcgaggtgtccgtggaagagaatcaccccttcacactgagagcccctatccagagaatctacggcgtgcgctataccgagacatggtcctttctgcccagcctgacatgtaccggggatgccgctcctgccatccagcacatttgcctgaagcacaccacctgtttccaggacgtggtggtggatgtggactgcgccgagaacaccaaagaggatcagctggccgagatcagctaccggttccagggaaagaaagaggccgaccagccttggatcgtggtcaacaccagcacactgttcgacgagctggaactggaccctcctgagattgaacccggggtgctgaaggtgctgagaaccgagaagcagtacctgggagtgtacatctggaacatgagaggcagcgacggcacctctacctacgccacctttctggtcacatggaagggcgacgagaaaacacggaaccccacaccagctgtgacccctcaacctagaggcgccgagtttcacatgtggaattaccacagccacgtgttcagcgtgggcgatacctttagcctggccatgcatctgcagtacaagatccacgaggcccctttcgacctgctgctggaatggctgtacgtgcccatcgatcctacctgccagcctatgcggctgtactccacctgtctgtatcaccccaacgctccccagtgcctgagccacatgaatagcggctgcaccttcacaagccctcacctggctcagcgagtggccagcacagtgtaccagaattgcgagcacgccgacaattacaccgcctactgtctgggcatcagccacatggaacctagcttcggcctgatcctgcacgatggcggcacaaccctgaagttcgtggatacccctgagagcctgagcggcctgtatgtgttcgtggtgtacttcaacggccacgtggaagccgtggcctacaccgtggtgtctaccgtggaccacttcgtgaacgccatcgaggaaagaggcttccctccaactgctggacagcctcctgccaccaccaagcctaaagaaatcacacccgtgaatcccggcacaagcccactgatcagatacgccgcttggacaggcggactggctgctgttgttctgctgtgcctggtcatcttcctgatctgcaccgccaagcggatgagagtgaaggcctacagagtggacaagagcccttacaaccagagcatgtactacgccggcctgcctgtggacgacttcgaggatagcgagagcaccgacaccgaggaagagttcggcaacgccattggaggatctcacggcggcagcagctataccgtgtacatcgacaagacccgg

SEQ ID NO: 36 - DNA, 1869 bp, synthetic construct
  source 1..1869: mol_type = other DNA
atgggcactgtcaacaagcccgtagtgggggtcctgatggggttcgggatcatcacggggactctgcggatcactaatccggttagggcctctgtgctgcgctatgacgacttccacattgatgaggataagctggacacaaatagcgtatatgagccatattaccatagcgatcatgctgagtcttcctgggtgaataggggtgagtcttcccgcaaggcttatgatcacaatagtccatacatctggccccggaatgactatgatggctttcttgagaacgcccacgagcatcatggtgtttacaaccaggggcgcggaattgacagtggagagaggttgatgcagcctactcagatgtccgctcaggaggatctgggcgacgacactggtatccatgtgattccgaccttaaacggtgatgaccggcataagatcgtgaatgtggatcaaaggcaatatggtgatgtgtttaagggggatcttaatcctaaacctcaaggacagaggttgattgaggtctctgtggaggaaaatcatcctttcactctgcgtgcgcccatacagagaatctatggagttcgatacaccgaaacctggtcttttctgcctagtctgacatgcactggggacgccgccccggcgattcagcacatatgcctgaagcataccacctgcttccaggacgtggtggtggatgtggattgtgccgagaataccaaggaggatcaactcgccgaaatctcatacaggttccagggcaagaaggaggccgaccagccgtggatcgtcgtcaatacaagtactctttttgacgagctggagctcgatccacctgagatcgagccaggtgtgctgaaagtgttgcgtactgaaaaacagtatctcggagtttatatttggaacatgaggggctctgatggtacaagcacatacgcaacctttctggtgacatggaaaggcgacgagaaaactcgtaaccccacccctgctgtgactccacagcctcggggggccgagtttcacatgtggaactaccattctcacgtgtttagtgtgggtgacacattttccctcgctatgcacctgcagtacaagatccatgaagccccctttgatcttctgctggagtggctctacgtgccgatagatccaacttgtcagcccatgaggttgtacagtacgtgcttgtaccaccccaacgccccccaatgtctgagccatatgaactccgggtgcacattcacgtcaccccatcttgcccagcgtgttgcgtccacggtgtatcagaactgcgagcacgcagataattacaccgcctattgccttggcatctcacacatggaacctagttttggcctgatcctccatgacggcggaactactctcaaattcgtggatacccctgagtctctgtccggcctgtacgtgtttgttgtatacttcaacggccatgtggaggctgtggcgtacactgttgtgagcactgtcgatcactttgtgaatgctatcgaggaaagaggctttcctccgacagctggacagccgcctgccaccactaagcccaaggagatcacacctgtcaatcccggaacctcgccactgataaggtatgccgcctggaccggcggcttggccgctgtggtgcttttgtgtttagttatttttttgatttgcactgcgaaacgcatgcgagttaaggcataccgggtggataagtcgccctacaaccagtctatgtactatgccgggctccccgtggacgattttgaggactcagagagcacggacacagaggaggagttcgggaacgcgataggggggtcccacggggggtcctcctacaccgtgtacatagacaagactcgg

SEQ ID NO: 37 - DNA, 1869 bp, synthetic construct
  source 1..1869: mol_type = other DNA
atgggcactgtcaacaagccggttgttggggtgctcatggggttcggcatcatcaccggtacactcaggattacaaatcctgtacgcgcgagtgtcttgcggtacgacgatttccatatcgatgaagataagctcgacacgaactccgtgtacgagccttattatcattctgatcatgcggagtcgtcatgggtgaatcggggtgagtcttccaggaaggcttatgatcataacagcccatacatatggcctcgtaatgattatgacggcttcctggagaacgcccatgagcaccacggtgtctataaccaaggtcgagggatagactctggggaaaggctgatgcagcctacccagatgtcggcacaggaggacctaggggatgacactggcatccatgtcatccccacgctcaatggcgacgaccgccataagatcgtgaatgtggaccagcggcagtacggggatgtcttcaaaggagaccttaaccctaagccccaagggcagcggttgatagaggtctccgttgaagaaaatcatccctttactctgcgggctcccattcaacgcatctatggggtccgctatactgagacgtggtccttcttgccgtccctgacctgtacaggtgatgctgcccccgctattcagcatatatgcctcaagcatactacttgctttcaggacgttgtggtcgatgtcgattgcgctgagaacacgaaggaggatcagttagctgagatttcctatcggttccagggtaaaaaggaggccgatcagccgtggatagtggtgaacacttcaaccctattcgacgagcttgaattggaccctcccgagatcgaacccggcgtcctgaaggttctgagaacagagaagcagtatcttggggtatatatctggaatatgcggggcagcgacggcacgtccacctatgcaaccttcttggtgacatggaagggcgatgagaagacacgtaaccccactccggctgtgacaccacagccgcgaggcgctgagttccacatgtggaattatcattcccatgtattcagtgttggggatacgttctctctggccatgcacctccagtacaagatacacgaggcgccctttgatcttttactggagtggctgtatgtgccaatcgatcctacatgtcaaccgatgaggttgtattccacttgtttatatcacccaaacgctcctcagtgtttgagtcatatgaacagtggatgtacctttacatcaccccatctggcacagagggtggcctccacggtctatcagaattgtgaacacgcagacaactatacagcctactgtctggggatcagccacatggagcctagcttcgggctgatactccacgacggtgggaccaccttaaagttcgtggatactcccgagtctttgagtggtctgtatgtgtttgtggtttattttaatggacacgtggaggcggtggcgtacacggtggtcagcacagttgaccacttcgtgaatgccatcgaggagcgggggttcccgcctacggctgggcaaccacccgctaccacgaagcccaaggagattactcctgtgaatcctgggacatcacctcttatcaggtacgccgcgtggaccggtggccttgccgcagttgttcttctgtgtctggtgattttcttgatctgcaccgcaaagcggatgcgggtcaaggcttaccgggtcgacaagagtccttacaatcagagtatgtactacgcgggcctcccggtagacgactttgaggactctgagtcgaccgacacagaagaagaattcggcaacgccatcggggggagccatggtggctcctcctacacggtgtatattgataagaccagg

SEQ ID NO: 38 - DNA, 1869 bp, synthetic construct
  source 1..1869: mol_type = other DNA
atggggacagttaataaacctgtggtgggggtattgatggggttcggaattatcacgggaacgttgcgtataacgaatccggtcagagcatccgtcttgcgatacgatgattttcacatcgatgaagacaaactggatacaaactccgtatatgagccttactaccattcagatcatgcggagtcttcatgggtaaatcggggagagtcttcgcgaaaagcgtacgatcataactcaccttatatatggccacgtaatgattatgatggatttttagagaacgcacacgaacaccatggggtgtataatcagggccgtggtatcgatagcggggaacggttaatgcaacccacacaaatgtctgcacaggaggatcttggggacgatacgggcatccacgttatccctacgttaaacggcgatgacagacataaaattgtaaatgtggaccaacgtcaatacggtgacgtgtttaaaggagatcttaatccaaaaccccaaggccaaagactcattgaggtgtcagtggaagaaaatcacccgtttactttacgcgcaccgattcagcggatttatggagtccggtacaccgagacttggagctttttgccgtcattaacctgtacgggagacgcagcgcccgccatccagcatatatgcttaaaacatacaacatgctttcaagacgtggtggtggatgtggattgcgcggaaaatactaaagaggatcagttggccgaaatcagttaccgttttcaaggtaagaaggaagcggaccaaccgtggattgttgtaaacacgagcacactgtttgatgaactcgaattagacccccccgagattgaaccgggtgtcttgaaagtacttcggacagaaaaacaatacttgggtgtgtacatttggaacatgcgcggctccgatggtacgtctacctacgccacgtttttggtcacctggaaaggggatgaaaaaacaagaaaccctacgcccgcagtaactcctcaaccaagaggggctgagtttcatatgtggaattaccactcgcatgtattttcagttggtgatacgtttagcttggcaatgcatcttcagtataagatacatgaagcgccatttgatttgctgttagagtggttgtatgtccccatcgatcctacatgtcaaccaatgcggttatattctacgtgtttgtatcatcccaacgcaccccaatgcctctctcatatgaattccggttgtacatttacctcgccacatttagcccagcgtgttgcaagcacagtgtatcaaaattgtgaacatgcagataactacaccgcatattgtctgggaatatctcatatggagcctagctttggtctaatcttacacgacgggggcaccacgttaaagtttgtagatacacccgagagtttgtcgggattatacgtttttgtggtgtattttaacgggcatgttgaagccgtagcatacactgttgtatccacagtagatcattttgtaaacgcaattgaggaacgtggatttccgccaacggccggtcagccaccggcgactactaaacccaaggaaattacccccgtaaaccccggaacgtcaccacttatacgatatgccgcatggaccggagggcttgcagcagtagtacttttatgtctcgtaatatttttaatctgtacggctaaacgaatgagggttaaagcctatagggtagacaagtccccgtataaccaaagcatgtattacgctggccttccagtggacgatttcgaggactcggaatctacggatacggaagaagagtttggtaacgcgattggagggagtcacgggggttcgagttacacggtgtatatagataagacccgg

SEQ ID NO: 39 - DNA, 1869 bp, synthetic construct; identical to SEQ ID NO: 37
  source 1..1869: mol_type = other DNA

SEQ ID NO: 40 - DNA, 1869 bp, synthetic construct
  source 1..1869: mol_type = other DNA
atgggtactgtgaataagcctgtggtgggggttctaatggggttcgggatcatcactggaacactgaggattaccaatcccgttagggcctccgtgctgcgttacgatgacttccacatcgacgaggataagctggataccaattcagtttatgagccttactaccactctgatcacgccgagagctcttgggtgaatcggggggagtcctctaggaaagcctatgatcataattctccatatatatggccaagaaatgattatgatggttttctggagaatgcacacgaacatcacggcgtttataaccaaggtcgtgggattgactcgggcgagcgtctgatgcaacccactcagatgtccgctcaggaagacctgggcgatgacactgggattcatgtgattccaactcttaatggcgacgatcgccataagattgtgaatgtggatcagagacagtatggagatgtgtttaagggcgatctgaatccgaagccccagggtcagagactcatcgaagtgagtgtggaggaaaaccatccctttactctgagggctccgattcagcgcatctacggtgtgcgctacactgagacttggagtttcctgccgtctttgacttgcacaggtgacgctgcccccgctattcagcatatttgcctcaagcacacaacatgcttccaggatgttgtggttgacgtggattgcgcagagaacaccaaagaggatcaattggccgaaatctcctatcgtttccaaggaaagaaggaggctgatcagccttggattgtggttaatacctctaccttgttcgatgagctggagctcgatcctcctgagatcgagcccggcgtgttgaaggttctcaggactgagaagcagtatttgggggtgtacatctggaatatgcggggtagtgacggaacgtccacctacgccacttttcttgtgacctggaaaggcgatgagaagacacgtaaccctacccctgctgtgactccacagccaaggggtgcggagttccacatgtggaattatcacagtcacgtgtttagcgttggcgatacgttcagtctggcaatgcatctgcagtataagatacacgaggcgccctttgatcttctgctagaatggttgtatgtcccaattgatccaacctgtcagcctatgaggctgtacagcacttgtctgtaccatcctaacgctcctcaatgtctttcgcacatgaacagtgggtgcaccttcacatctccgcatctggcgcagagggtggcctccaccgtctatcagaattgcgaacacgccgataactataccgcttattgtctggggattagccacatggagcccagctttgggctgatcctgcacgacggtgggacgactctgaagtttgtggacactccagagtctctcagcggtttgtacgtgttcgtggtgtatttcaatgggcatgtcgaggccgtggcctacaccgttgtaagtactgtggatcactttgtgaatgctatcgaggagcgtggcttcccgcccacggcgggacagccgcctgccacgacgaagcccaaggagatcactccagtgaatcctggtacatcgcctttgatacggtacgcagcctggactggtggtctggctgctgtcgtgctcttatgtctggtgatctttctgatttgtactgctaagcggatgcgagtgaaggcttatcgggtcgataagagcccatacaatcagagcatgtactatgctggtctccctgtggatgattttgaagatagtgagagcacagacactgaggaggagtttggcaatgccatcggtggtagccacggcggatcttcttacactgtctatatcgacaagactcgt

SEQ ID NO: 41 - DNA, 1869 bp, synthetic construct
  source 1..1869: mol_type = other DNA
atggggactgttaataagccagttgtgggagttctgatggggttcggtatcatcactgggactctcaggattaccaatcctgttcgcgcctctgttttacgctatgatgactttcatattgatgaggataagctcgacacaaactctgtgtacgagccttattatcatagcgatcatgcagagtcgtcatgggtaaataggggtgagagttcccgcaaggcttatgatcataacagtccttatatctggccaagaaatgattacgatggtttcttggagaatgcccatgagcatcatggtgtttacaaccagggcagggggattgattctggagagcgtcttatgcagcctacccagatgtccgcccaggaggacctgggtgatgacactgggatccatgtgattccaactcttaatggtgacgatcgccataagattgtgaacgtggatcagaggcagtatggggacgtttttaagggcgatctcaatcctaagccgcagggacagaggctgatcgaggtttctgtggaggagaaccatccctttaccttgcgggctccaatccaaaggatctatggagtgaggtacacagaaacttggtcatttctgccctcgcttacctgcactggagatgctgctcccgctattcaacatatctgtctcaagcacaccacgtgcttccaggatgtggttgtagacgtcgattgcgctgagaataccaaggaggatcagctggctgagatcagttaccgcttccaggggaagaaggaagctgatcagccttggattgttgtgaatacgtctacactgtttgacgagcttgaactggaccctccagaaatcgagccaggtgtgttgaaagtgttgaggactgagaaacagtaccttggagtgtatatctggaatatgagaggttccgacgggacctctacatatgccactttcctcgtgacgtggaagggcgacgagaagactcggaatcccacgccggctgtgaccccacagccgcgtggggccgagtttcacatgtggaattatcattctcacgtgttctctgtgggcgacacgttcagtttggccatgcaccttcagtacaagatacacgaagccccttttgatcttctgctcgaatggctgtatgtgccaattgacccgacgtgtcagcccatgagattatactctacgtgtttatatcatccaaatgctccacagtgtttgagtcatatgaacagtgggtgtacgttcacaagtcctcatctagcgcagcgcgtggcttccactgtctatcagaactgtgagcacgcagacaactatacagcctactgtctggggattagccacatggagccaagctttgggctgattcttcacgacggtggcaccacacttaagttcgtggacactcccgagtctttaagtgggttgtatgtttttgtggtttatttcaatggacacgtggaagccgtggcttacactgtggtgagtactgtggatcacttcgtgaatgccatcgaggagcgggggtttcctcctacggcaggacagccccccgcgaccacaaagcctaaggaaattaccccggtgaatccaggtacctcgcctcttatcaggtatgcagcctggaccggtggtctggctgcagtcgtgctactatgcctcgtgattttcttgatctgcactgctaaacgcatgcgtgtcaaggcttatagggtggataaatccccctataaccagtctatgtactatgctggccttcctgtggacgacttcgaggattcggagtcgaccgatacagaggaggagtttggcaatgcgatcggggggagtcacgggggtagtagctacactgtgtatatcgataagacgagg

SEQ ID NO: 42 - DNA, 1869 bp, synthetic construct
  source 1..1869: mol_type = other DNA
atggggactgttaataagcctgtggtcggagtgttgatggggtttgggatcatcaccgggacattgaggatcacgaatcctgttcgtgcctcggtgttgcggtacgatgatttccacatagatgaggataagttggataccaattccgtttatgagccctattaccactctgaccacgccgaatcatcttgggtgaaccggggtgagtcttcgcgcaaggcttatgatcataattctccatacatatggccaagaaatgattatgatggtttcctggagaatgcccatgagcatcatggcgtttataaccaaggcagggggattgattctggagagcgtcttatgcagcctacccagatgtccgcccaggaggacctgggtgatgacactgggatccatgtgattccaactcttaatggtgacgatcgccataagattgtgaacgtggatcagaggcagtatggggacgtttttaagggcgatctcaatcctaagccgcagggacagaggctgatcgaggtttctgtggaggagaaccatccctttaccttgcgggctccaatccaaaggatctatggagtgaggtacacagaaacttggtcatttctgccctcgcttacctgcactggtgacgctgcccctgctattcagcatatatgccttaagcatacaacttgttttcaggatgtggtggtggatgttgattgcgctgagaataccaaggaagatcagcttgccgaaatttcttacagatttcagggcaaaaaggaagctgatcaaccttggattgttgtcaatacatccacgctttttgacgagctggagctcgatcccccggaaatcgagcctggcgtgttgaaggtgctgcgtactgagaagcaatatcttggggtgtatatctggaatatgcgggggtcggacggcaccagtacctatgccactttcctcgtgacgtggaagggcgacgagaagactcggaatcccacgccggctgtgaccccacagccgcgtggggccgagtttcacatgtggaattatcattctcacgtgttctctgtgggcgacacgttcagtttggccatgcaccttcagtacaagatacacgaagccccttttgatcttctgctcgaatggctgtatgtgccaattgacccgacgtgtcagcccatgagattatactctacgtgtttatatcatccaaatgctccacagtgtttgagtcatatgaacagtgggtgtacgttcacaagtccccacctagcccagcgggtggcctcgacggtgtaccagaattgtgagcatgctgacaactatacggcatactgcctcggaattagccacatggagccaagcttcgggctgattctgcatgacggtggaactacacttaaattcgtggacactcctgagtcgcttagcgggttgtacgtgtttgtagtgtatttcaatggtcatgttgaggcagtggcttataccgttgtcagcactgttgatcattttgtgaacgccattgaggagcgggggttcccgcctacggctgggcaaccccccgctacgactaagcccaaagagattacaccagtgaaccctggcacaagccccctgattaggtatgctgcctggacaggcgggcttgctgccgtggtgttgctgtgtctagtcatctttttgatctgcactgccaagcggatgcgggtcaaggcttatcgggttgacaagtctccgtataatcagtcgatgtattacgcaggccttcctgtggatgattttgaggactctgagtccacagacaccgaggaggagtttggtaatgctattggcggtagtcacggggggtcgtcatatacagtgtatatcgacaagactcgg

SEQ ID NO: 43 - DNA, 1869 bp, synthetic construct
  source 1..1869: mol_type = other DNA
atggggactgttaataagccagttgtgggagttctgatggggttcggtatcatcactgggactctcaggattaccaatcctgttcgcgcctctgttttacgctatgatgactttcatattgatgaggataagctcgacacaaactctgtgtacgagccttattatcatagcgatcatgcagagtcgtcatgggtaaataggggtgagagttcccgcaaggcttatgatcataacagtccttatatctggccaagaaatgattacgatggtttcttggagaatgcccatgagcatcatggtgtttacaaccagggtcggggtatcgactctggcgagagattgatgcaaccgacccaaatgagtgcgcaggaggacctaggcgatgataccgggattcacgtgattcctactctgaatggcgacgacagacacaagattgtcaatgttgatcagcggcagtacggggatgtgttcaagggtgacctcaatccgaagcctcaggggcagaggctcattgaggtttcggttgaggagaatcatccttttacactccgtgctcctattcagaggatttacggggtccggtatacagagacctggtcttttctgccgtcacttacttgcactggagatgctgctcccgctattcaacatatctgtctcaagcacaccacgtgcttccaggatgtggttgtagacgtcgattgcgctgagaataccaaggaggatcagctggctgagatcagttaccgcttccaggggaagaaggaagctgatcagccttggattgttgtgaatacgtctacactgtttgacgagcttgaactggaccctccagaaatcgagccaggtgtgttgaaagtgttgaggactgagaaacagtaccttggagtgtatatctggaatatgagaggttccgacgggacctctacatatgccactttcctcgtgacgtggaagggcgacgagaagactcggaatcccacgccggctgtgaccccacagccgcgtggggccgagtttcacatgtggaattatcattctcacgtgttctctgtgggcgacacgttcagtttggccatgcaccttcagtacaagatacacgaagccccttttgatcttctgctcgaatggctgtatgtgccaattgacccgacgtgtcagcccatgagattatactctacgtgtttatatcatccaaatgctccacagtgtttgagtcatatgaacagtgggtgtacgttcacaagtcctcatctagcgcagcgcgtggcttccactgtctatcagaactgtgagcacgcagacaactatacagcctactgtctggggattagccacatggagccaagctttgggctgattcttcacgacggtggcaccacacttaagttcgtggacactcccgagtctttaagtgggttgtatgtttttgtggtttatttcaatggacacgtggaagccgtggcttacactgtggtgagtactgtggatcacttcgtgaatgccatcgaggagcgggggtttcctcctacggcaggacagccccccgcgaccacaaagcctaaggaaattaccccggtgaatccaggtacctcgcctcttatcaggtatgcagcctggaccggtggtctggctgcagtcgtgctactatgcctcgtgattttcttgatctgcactgctaaacgcatgcgtgtcaaggcttatagggtggataaatccccctataaccagtctatgtactatgctggccttcctgtggacgacttcgaggattcggagtcgaccgatacagaggaggagtttggcaatgcgatcggggggagtcacgggggtagtagctacactgtgtatatcgataagacgagg

SEQ ID NO: 44 - DNA, 1869 bp, synthetic construct
  source 1..1869: mol_type = other DNA
atggggactgttaataagcctgtggtcggagtgttgatggggtttgggatcatcaccgggacattgaggatcacgaatcctgttcgtgcctcggtgttgcggtacgatgatttccacatagatgaggataagttggataccaattccgtttatgagccctattaccactctgaccacgccgaatcatcttgggtgaaccggggtgagtcttcgcgcaaggcttatgatcataattctccatacatatggccaagaaatgattatgatggtttcctggagaatgcccatgagcatcatggcgtttataaccaaggcagggggattgattctggagagcgtcttatgcagcctacccagatgtccgcccaggaggacctgggtgatgacactgggatccatgtgattccaactcttaatggtgacgatcgccataagattgtgaacgtggatcagaggcagtatggggacgtttttaagggcgatctcaatcctaagccgcagggacagaggctgatcgaggtttctgtggaggagaaccatccctttaccttgcgggctccaatccaaaggatctatggagtgaggtacacagaaacttggtcatttctgccctcgcttacctgcactggtgacgctgcccctgctattcagcatatatgccttaagcatacaacttgttttcaggatgtggtggtggatgttgattgcgctgagaataccaaggaagatcagcttgccgaaatttcttacagatttcagggcaaaaaggaagctgatcaaccttggattgttgtcaatacatccacgctttttgacgagctggagctcgatcccccggaaatcgagcctggcgtgttgaaggtgctgcgtactgagaagcaatatcttggggtgtatatctggaatatgcgggggtcggacggcaccagtacctatgccactttcctcgtgacgtggaagggcgacgagaagactcggaatcccacgccggctgtgaccccacagccgcgtggggccgagtttcacatgtggaattatcattctcacgtgttctctgtgggcgacacgttcagtttggccatgcaccttcagtacaagatacacgaagccccttttgatcttctgctcgaatggctgtatgtgccaattgacccgacgtgtcagcccatgagattatactctacgtgtttatatcatccaaatgctccacagtgtttgagtcatatgaacagtgggtgtacgttcacaagtccccacctagcccagcgggtggcctcgacggtgtaccagaattgtgagcatgctgacaactatacggcatactgcctcggaattagccacatggagccaagcttcgggctgattctgcatgacggtggaactacacttaaattcgtggacactcctgagtcgcttagcgggttgtacgtgtttgtagtgtatttcaatggtcatgttgaggcagtggcttataccgttgtcagcactgttgatcattttgtgaacgccattgaggagcgggggttcccgcctacggctgggcaaccccccgctacgactaagcctaaggaaattaccccggtgaatccaggtacctcgcctcttatcaggtatgcagcctggaccggtggtctggctgcagtcgtgctactatgcctcgtgattttcttgatctgcactgctaaacgcatgcgtgtcaaggcttatagggtggataaatccccctataaccagtctatgtactatgctggccttcctgtggacgacttcgaggattcggagtcgaccgatacagaggaggagtttggcaatgcgatcggggggagtcacgggggtagtagctacactgtgtatatcgataagacgagg

SEQ ID NO: 45 - DNA, 1869 bp, synthetic construct
  source 1..1869: mol_type = other DNA
atggggactgttaataagcctgtggtcggagtgttgatggggtttgggatcatcaccgggacattgaggatcacgaatcctgttcgtgcctcggtgttgcggtacgatgatttccacatagatgaggataagttggataccaattccgtttatgagccctattaccactctgaccacgccgaatcatcttgggtgaaccggggtgagtcttcgcgcaaggcttatgatcataattctccatacatatggccaagaaatgattatgatggtttcctggagaatgcccatgagcatcatggcgtttataaccaaggtcggggtatcgactctggcgagagattgatgcaaccgacccaaatgagtgcgcaggaggacctaggcgatgataccgggattcacgtgattcctactctgaatggcgacgacagacacaagattgtcaatgttgatcagcggcagtacggggatgtgttcaagggtgacctcaatccgaagcctcaggggcagaggctcattgaggtttcggttgaggagaatcatccttttacactccgtgctcctattcagaggatttacggggtccggtatacagagacctggtcttttctgccgtcacttacttgcactggtgacgctgcccctgctattcagcatatatgccttaagcatacaacttgttttcaggatgtggtggtggatgttgattgcgctgagaataccaaggaagatcagcttgccgaaatttcttacagatttcagggcaaaaaggaagctgatcaaccttggattgttgtcaatacatccacgctttttgacgagctggagctcgatcccccggaaatcgagcctggcgtgttgaaggtgctgcgtactgagaagcaatatcttggggtgtatatctggaatatgcgggggtcggacggcaccagtacctatgccacctttctagtaacctggaagggtgacgagaagacccggaaccccacccctgctgtgactccgcagcctaggggtgcggagttccacatgtggaattaccattcccatgtgttttccgtgggtgatacgttcagtctggctatgcacctccagtataagatacacgaagctccttttgatcttctactggaatggctgtatgtgccgattgaccctacgtgtcagcccatgagattgtattcgacgtgtttgtatcatccaaatgctccacagtgtttgagtcatatgaacagcggatgcactttcaccagtccccacctagcccagcgggtggcctcgacggtgtaccagaattgtgagcatgctgacaactatacggcatactgcctcggaattagccacatggagccaagcttcgggctgattctgcatgacggtggaactacacttaaattcgtggacactcctgagtcgcttagcgggttgtacgtgtttgtagtgtatttcaatggtcatgttgaggcagtggcttataccgttgtcagcactgttgatcattttgtgaacgccattgaggagcgggggttcccgcctacggctgggcaaccccccgctacgactaagcccaaagagattacaccagtgaaccctggcacaagccccctgattaggtatgctgcctggacaggcgggcttgctgccgtggtgttgctgtgtctagtcatctttttgatctgcactgccaagcggatgcgggtcaaggcttatcgggttgacaagtctccgtataatcagtcgatgtattacgcaggccttcctgtggatgattttgaggactctgagtccacagacaccgaggaggagtttggtaatgctattggcggtagtcacggggggtcgtcatatacagtgtatatcgacaagactcgg

SEQ ID NO: 46 - DNA, 1869 bp, synthetic construct
  source 1..1869: mol_type = other DNA
atggggactgttaataagccagttgtgggagttctgatggggttcggtatcatcactgggactctcaggattaccaatcctgttcgcgcctctgttttacgctatgatgactttcatattgatgaggataagctcgacacaaactctgtgtacgagccttattatcatagcgatcatgcagagtcgtcatgggtaaataggggtgagagttcccgcaaggcttatgatcataacagtccttatatctggccaagaaatgattacgatggtttcttggagaatgcccatgagcatcatggtgtttacaaccagggcagggggattgattctggagagcgtcttatgcagcctacccagatgtccgcccaggaggacctgggtgatgacactgggatccatgtgattccaactcttaatggtgacgatcgccataagattgtgaacgtggatcagaggcagtatggggacgtttttaagggcgatctcaatcctaagccgcagggacagaggctgatcgaggtttctgtggaggagaaccatccctttaccttgcgggctccaatccaaaggatctatggagtgaggtacacagaaacttggtcatttctgccctcgcttacctgcactggtgacgctgcccctgctattcagcatatatgccttaagcatacaacttgttttcaggatgtggtggtggatgttgattgcgctgagaataccaaggaagatcagcttgccgaaatttcttacagatttcagggcaaaaaggaagctgatcaaccttggattgttgtcaatacatccacgctttttgacgagctggagctcgatcccccggaaatcgagcctggcgtgttgaaggtgctgcgtactgagaagcaatatcttggggtgtatatctggaatatgcgggggtcggacggcaccagtacctatgccactttcctcgtgacgtggaagggcgacgagaagactcggaatcccacgccggctgtgaccccacagccgcgtggggccgagtttcacatgtggaattatcattctcacgtgttctctgtgggcgacacgttcagtttggccatgcaccttcagtacaagatacacgaagccccttttgatcttctgctcgaatggctgtatgtgccaattgacccgacgtgtcagcccatgagattatactctacgtgtttatatcatccaaatgctccacagtgtttgagtcatatgaacagtgggtgtacgttcacaagtcctcatctagcgcagcgcgtggcttccactgtctatcagaactgtgagcacgcagacaactatacagcctactgtctggggattagccacatggagccaagctttgggctgattcttcacgacggtggcaccacacttaagttcgtggacactcccgagtctttaagtgggttgtatgtttttgtggtttatttcaatggacacgtggaagccgtggcttacactgtggtgagtactgtggatcacttcgtgaatgccatcgaggagcgggggtttcctcctacggcaggacagccccccgcgaccacaaagcctaaggaaattaccccggtgaatccaggtacctcgcctcttatcaggtatgcagcctggaccggtggtctggctgcagtcgtgctactatgcctcgtgattttcttgatctgcactgctaaacgcatgcgtgtcaaggcttatagggtggataaatccccctataaccagtctatgtactatgctggccttcctgtggacgacttcgaggattcggagtcgaccgatacagaggaggagtttggcaatgcgatcggggggagtcacgggggtagtagctacactgtgtatatcgataagacgagg

SEQ ID NO: 47 - DNA, 1869 bp, synthetic construct
  source 1..1869: mol_type = other DNA
atggggactgttaataagcctgtggtcggagtgttgatggggtttgggatcatcaccgggacattgaggatcacgaatcctgttcgtgcctcggtgttgcggtacgatgatttccacatagatgaggataagttggataccaattccgtttatgagccctattaccactctgaccacgccgaatcatcttgggtgaaccggggtgagtcttcgcgcaaggcttatgatcataattctccatacatatggccaagaaatgattatgatggtttcctggagaatgcccatgagcatcatggcgtttataaccaaggcagggggattgattctggagagcgtcttatgcagcctacccagatgtccgcccaggaggacctgggtgatgacactgggatccatgtgattccaactcttaatggtgacgatcgccataagattgtgaacgtggatcagaggcagtatggggacgtttttaagggcgatctcaatcctaagccgcagggacagaggctgatcgaggtttctgtggaggagaaccatccctttaccttgcgggctccaatccaaaggatctatggagtgaggtacacagaaacttggtcatttctgccctcgcttacctgcactggagatgctgctcccgctattcaacatatctgtctcaagcacaccacgtgcttccaggatgtggttgtagacgtcgattgcgctgagaataccaaggaggatcagctggctgagatcagttaccgcttccaggggaagaaggaagctgatcagccttggattgttgtgaatacgtctacactgtttgacgagcttgaactggaccctccagaaatcgagccaggtgtgttgaaagtgttgaggactgagaaacagtaccttggagtgtatatctggaatatgagaggttccgacgggacctctacatatgccacctttctagtaacctggaagggtgacgagaagacccggaaccccacccctgctgtgactccgcagcctaggggtgcggagttccacatgtggaattaccattcccatgtgttttccgtgggtgatacgttcagtctggctatgcacctccagtataagatacacgaagctccttttgatcttctactggaatggctgtatgtgccgattgaccctacgtgtcagcccatgagattgtattcgacgtgtttgtatcatccaaatgctccacagtgtttgagtcatatgaacagcggatgcactttcaccagtccccacctagcccagcgggtggcctcgacggtgtaccagaattgtgagcatgctgacaactatacggcatactgcctcggaattagccacatggagccaagcttcgggctgattctgcatgacggtggaactacacttaaattcgtggacactcctgagtcgcttagcgggttgtacgtgtttgtagtgtatttcaatggtcatgttgaggcagtggcttataccgttgtcagcactgttgatcattttgtgaacgccattgaggagcgggggttcccgcctacggctgggcaaccccccgctacgactaagcccaaagagattacaccagtgaaccctggcacaagccccctgattaggtatgctgcctggacaggcgggcttgctgccgtggtgttgctgtgtctagtcatctttttgatctgcactgccaagcggatgcgggtcaaggcttatcgggttgacaagtctccgtataatcagtcgatgtattacgcaggccttcctgtggatgattttgaggactctgagtccacagacaccgaggaggagtttggtaatgctattggcggtagtcacggggggtcgtcatatacagtgtatatcgacaagactcgg

SEQ ID NO: 48 - DNA, 1869 bp, synthetic construct
  source 1..1869: mol_type = other DNA
atggggactgttaataagcctgtggtcggagtgttgatggggtttgggatcatcaccgggacattgaggatcacgaatcctgttcgtgcctcggtgttgcggtacgatgatttccacatagatgaggataagttggataccaattccgtttatgagccctattaccactctgaccacgccgaatcatcttgggtgaaccggggtgagtcttcgcgcaaggcttatgatcataattctccatacatatggccaagaaatgattatgatggtttcctggagaatgcccatgagcatcatggcgtttataaccaaggcagggggattgattctggagagcgtcttatgcagcctacccagatgtccgcccaggaggacctgggtgatgacactgggatccatgtgattccaactcttaatggtgacgatcgccataagattgtgaacgtggatcagaggcagtatggggacgtttttaagggcgatctcaatcctaagccgcagggacagaggctgatcgaggtttctgtggaggagaaccatccctttaccttgcgggctccaatccaaaggatctatggagtgaggtacacagaaacttggtcatttctgccctcgcttacctgcactggagatgctgctcccgctattcaacatatctgtctcaagcacaccacgtgcttccaggatgtggttgtagacgtcgattgcgctgagaataccaaggaggatcagctggctgagatcagttaccgcttccaggggaagaaggaagctgatcagccttggattgttgtgaatacgtctacactgtttgacgagcttgaactggaccctccagaaatcgagccaggtgtgttgaaagtgttgaggactgagaaacagtaccttggagtgtatatctggaatatgagaggttccgacgggacctctacatatgccactttcctcgtgacgtggaagggcgacgagaagactcggaatcccacgccggctgtgaccccacagccgcgtggggccgagtttcacatgtggaattatcattctcacgtgttctctgtgggcgacacgttcagtttggccatgcaccttcagtacaagatacacgaagccccttttgatcttctgctcgaatggctgtatgtgccaattgacccgacgtgtcagcccatgagattatactctacgtgtttatatcatccaaatgctccacagtgtttgagtcatatgaacagtgggtgtacgttcacaagtcctcatctagcgcagcgcgtggcttccactgtctatcagaactgtgagcacgcagacaactatacagcctactgtctggggattagccacatggagccaagctttgggctgattcttcacgacggtggcaccacacttaagttcgtggacactcccgagtctttaagtgggttgtatgtttttgtggtttatttcaatggacacgtggaagccgtggcttacactgtggtgagtactgtggatcacttcgtgaatgccatcgaggagcgggggtttcctcctacggcaggacagccccccgcgaccacaaagcctaaggaaattaccccggtgaatccaggtacctcgcctcttatcaggtatgcagcctggaccggtggtctggctgcagtcgtgctactatgcctcgtgattttcttgatctgcactgctaaacgcatgcgtgtcaaggcttatagggtggataaatccccctataaccagtctatgtactatgctggccttcctgtggacgacttcgaggattcggagtcgaccgatacagaggaggagtttggcaatgcgatcggggggagtcacgggggtagtagctacactgtgtatatcgataagacgagg

SEQ ID NO: 49 - DNA, 1869 bp, synthetic construct
  source 1..1869: mol_type = other DNA
atggggactgttaataagccagttgtgggagttctgatggggttcggtatcatcactgggactctcaggattaccaatcctgttcgcgcctctgttttacgctatgatgactttcatattgatgaggataagctcgacacaaactctgtgtacgagccttattatcatagcgatcatgcagagtcgtcatgggtaaataggggtgagagttcccgcaaggcttatgatcataacagtccttatatctggccaagaaatgattacgatggtttcttggagaatgcccatgagcatcatggtgtttacaaccagggtcggggtatcgactctggcgagagattgatgcaaccgacccaaatgagtgcgcaggaggacctaggcgatgataccgggattcacgtgattcctactctgaatggcgacgacagacacaagattgtcaatgttgatcagcggcagtacggggatgtgttcaagggtgacctcaatccgaagcctcaggggcagaggctcattgaggtttcggttgaggagaatcatccttttacactccgtgctcctattcagaggatttacggggtccggtatacagagacctggtcttttctgccgtcacttacttgcactggagatgctgctcccgctattcaacatatctgtctcaagcacaccacgtgcttccaggatgtggttgtagacgtcgattgcgctgagaataccaaggaggatcagctggctgagatcagttaccgcttccaggggaagaaggaagctgatcagccttggattgttgtgaatacgtctacactgtttgacgagcttgaactggaccctccagaaatcgagccaggtgtgttgaaagtgttgaggactgagaaacagtaccttggagtgtatatctggaatatgagaggttccgacgggacctctacatatgccacctttctagtaacctggaagggtgacgagaagacccggaaccccacccctgctgtgactccgcagcctaggggtgcggagttccacatgtggaattaccattcccatgtgttttccgtgggtgatacgttcagtctggctatgcacctccagtataagatacacgaagctccttttgatcttctactggaatggctgtatgtgccgattgaccctacgtgtcagcccatgagattgtattcgacgtgtttgtatcatccaaatgctccacagtgtttgagtcatatgaacagcggatgcactttcaccagtcctcatctagcgcagcgcgtggcttccactgtctatcagaactgtgagcacgcagacaactatacagcctactgtctggggattagccacatggagccaagctttgggctgattcttcacgacggtggcaccacacttaagttcgtggacactcccgagtctttaagtgggttgtatgtttttgtggtttatttcaatggacacgtggaagccgtggcttacactgtggtgagtactgtggatcacttcgtgaatgccatcgaggagcgggggtttcctcctacggcaggacagccccccgcgaccacaaagcccaaagagattacaccagtgaaccctggcacaagccccctgattaggtatgctgcctggacaggcgggcttgctgccgtggtgttgctgtgtctagtcatctttttgatctgcactgccaagcggatgcgggtcaaggcttatcgggttgacaagtctccgtataatcagtcgatgtattacgcaggccttcctgtggatgattttgaggactctgagtccacagacaccgaggaggagtttggtaatgctattggcggtagtcacggggggtcgtcatatacagtgtatatcgacaagactcgg

SEQ ID NO: 50 - DNA, 1869 bp, synthetic construct
  source 1..1869: mol_type = other DNA
atggggactgttaataagccagttgtgggagttctgatggggttcggtatcatcactgggactctcaggattaccaatcctgttcgcgcctctgttttacgctatgatgactttcatattgatgaggataagctcgacacaaactctgtgtacgagccttattatcatagcgatcatgcagagtcgtcatgggtaaataggggtgagagttcccgcaaggcttatgatcataacagtccttatatctggccaagaaatgattacgatggtttcttggagaatgcccatgagcatcatggtgtttacaaccagggcagggggattgattctggagagcgtcttatgcagcctacccagatgtccgcccaggaggacctgggtgatgacactgggatccatgtgattccaactcttaatggtgacgatcgccataagattgtgaacgtggatcagaggcagtatggggacgtttttaagggcgatctcaatcctaagccgcagggacagaggctgatcgaggtttctgtggaggagaaccatccctttaccttgcgggctccaatccaaaggatctatggagtgaggtacacagaaacttggtcatttctgccctcgcttacctgcactggtgacgctgcccctgctattcagcatatatgccttaagcatacaacttgttttcaggatgtggtggtggatgttgattgcgctgagaataccaaggaagatcagcttgccgaaatttcttacagatttcagggcaaaaaggaagctgatcaaccttggattgttgtcaatacatccacgctttttgacgagctggagctcgatcccccggaaatcgagcctggcgtgttgaaggtgctgcgtactgagaagcaatatcttggggtgtatatctggaatatgcgggggtcggacggcaccagtacctatgccacctttctagtaacctggaagggtgacgagaagacccggaaccccacccctgctgtgactccgcagcctaggggtgcggagttccacatgtggaattaccattcccatgtgttttccgtgggtgatacgttcagtctggctatgcacctccagtataagatacacgaagctccttttgatcttctactggaatggctgtatgtgccgattgaccctacgtgtcagcccatgagattgtattcgacgtgtttgtatcatccaaatgctccacagtgtttgagtcatatgaacagcggatgcactttcaccagtccccacctagcccagcgggtggcctcgacggtgtaccagaattgtgagcatgctgacaactatacggcatactgcctcggaattagccacatggagccaagcttcgggctgattctgcatgacggtggaactacacttaaattcgtggacactcctgagtcgcttagcgggttgtacgtgtttgtagtgtatttcaatggtcatgttgaggcagtggcttataccgttgtcagcactgttgatcattttgtgaacgccattgaggagcgggggttcccgcctacggctgggcaaccccccgctacgactaagcccaaagagattacaccagtgaaccctggcacaagccccctgattaggtatgctgcctggacaggcgggcttgctgccgtggtgttgctgtgtctagtcatctttttgatctgcactgccaagcggatgcgggtcaaggcttatcgggttgacaagtctccgtataatcagtcgatgtattacgcaggccttcctgtggatgattttgaggactctgagtccacagacaccgaggaggagtttggtaatgctattggcggtagtcacggggggtcgtcatatacagtgtatatcgacaagactcgg

SEQ ID NO: 51 - DNA, 1869 bp, synthetic construct
  source 1..1869: mol_type = other DNA
atggggactgttaataagccagttgtgggagttctgatggggttcggtatcatcactgggactctcaggattaccaatcctgttcgcgcctctgttttacgctatgatgactttcatattgatgaggataagctcgacacaaactctgtgtacgagccttattatcatagcgatcatgcagagtcgtcatgggtaaataggggtgagagttcccgcaaggcttatgatcataacagtccttatatctggccaagaaatgattacgatggtttcttggagaatgcccatgagcatcatggtgtttacaaccagggtcggggtatcgactctggcgagagattgatgcaaccgacccaaatgagtgcgcaggaggacctaggcgatgataccgggattcacgtgattcctactctgaatggcgacgacagacacaagattgtcaatgttgatcagcggcagtacggggatgtgttcaagggtgacctcaatccgaagcctcaggggcagaggctcattgaggtttcggttgaggagaatcatccttttacactccgtgctcctattcagaggatttacggggtccggtatacagagacctggtcttttctgccgtcacttacttgcactggtgacgctgcccctgctattcagcatatatgccttaagcatacaacttgttttcaggatgtggtggtggatgttgattgcgctgagaataccaaggaagatcagcttgccgaaatttcttacagatttcagggcaaaaaggaagctgatcaaccttggattgttgtcaatacatccacgctttttgacgagctggagctcgatcccccggaaatcgagcctggcgtgttgaaggtgctgcgtactgagaagcaatatcttggggtgtatatctggaatatgcgggggtcggacggcaccagtacctatgccactttcctcgtgacgtggaagggcgacgagaagactcggaatcccacgccggctgtgaccccacagccgcgtggggccgagtttcacatgtggaattatcattctcacgtgttctctgtgggcgacacgttcagtttggccatgcaccttcagtacaagatacacgaagccccttttgatcttctgctcgaatggctgtatgtgccaattgacccgacgtgtcagcccatgagattatactctacgtgtttatatcatccaaatgctccacagtgtttgagtcatatgaacagtgggtgtacgttcacaagtccccacctagcccagcgggtggcctcgacggtgtaccagaattgtgagcatgctgacaactatacggcatactgcctcggaattagccacatggagccaagcttcgggctgattctgcatgacggtggaactacacttaaattcgtggacactcctgagtcgcttagcgggttgtacgtgtttgtagtgtatttcaatggtcatgttgaggcagtggcttataccgttgtcagcactgttgatcattttgtgaacgccattgaggagcgggggttcccgcctacggctgggcaaccccccgctacgactaagcctaaggaaattaccccggtgaatccaggtacctcgcctcttatcaggtatgcagcctggaccggtggtctggctgcagtcgtgctactatgcctcgtgattttcttgatctgcactgctaaacgcatgcgtgtcaaggcttatagggtggataaatccccctataaccagtctatgtactatgctggccttcctgtggacgacttcgaggattcggagtcgaccgatacagaggaggagtttggcaatgcgatcggggggagtcacgggggtagtagctacactgtgtatatcgataagacgagg

SEQ ID NO: 52 - DNA, 1869 bp, synthetic construct
  source 1..1869: mol_type = other DNA
atggggactgttaataagcctgtggtcggagtgttgatggggtttgggatcatcaccgggacattgaggatcacgaatcctgttcgtgcctcggtgttgcggtacgatgatttccacatagatgaggataagttggataccaattccgtttatgagccctattaccactctgaccacgccgaatcatcttgggtgaaccggggtgagtcttcgcgcaaggcttatgatcataattctccatacatatggccaagaaatgattatgatggtttcctggagaatgcccatgagcatcatggcgtttataaccaaggtcggggtatcgactctggcgagagattgatgcaaccgacccaaatgagtgcgcaggaggacctaggcgatgataccgggattcacgtgattcctactctgaatggcgacgacagacacaagattgtcaatgttgatcagcggcagtacggggatgtgttcaagggtgacctcaatccgaagcctcaggggcagaggctcattgaggtttcggttgaggagaatcatccttttacactccgtgctcctattcagaggatttacggggtccggtatacagagacctggtcttttctgccgtcacttacttgcactggtgacgctgcccctgctattcagcatatatgccttaagcatacaacttgttttcaggatgtggtggtggatgttgattgcgctgagaataccaaggaagatcagcttgccgaaatttcttacagatttcagggcaaaaaggaagctgatcaaccttggattgttgtcaatacatccacgctttttgacgagctggagctcgatcccccggaaatcgagcctggcgtgttgaaggtgctgcgtactgagaagcaatatcttggggtgtatatctggaatatgcgggggtcggacggcaccagtacctatgccactttcctcgtgacgtggaagggcgacgagaagactcggaatcccacgccggctgtgaccccacagccgcgtggggccgagtttcacatgtggaattatcattctcacgtgttctctgtgggcgacacgttcagtttggccatgcaccttcagtacaagatacacgaagccccttttgatcttctgctcgaatggctgtatgtgccaattgacccgacgtgtcagcccatgagattatactctacgtgtttatatcatccaaatgctccacagtgtttgagtcatatgaacagtgggtgtacgttcacaagtcctcatctagcgcagcgcgtggcttccactgtctatcagaactgtgagcacgcagacaactatacagcctactgtctggggattagccacatggagccaagctttgggctgattcttcacgacggtggcaccacacttaagttcgtggacactcccgagtctttaagtgggttgtatgtttttgtggtttatttcaatggacacgtggaagccgtggcttacactgtggtgagtactgtggatcacttcgtgaatgccatcgaggagcgggggtttcctcctacggcaggacagccccccgcgaccacaaagcccaaagagattacaccagtgaaccctggcacaagccccctgattaggtatgctgcctggacaggcgggcttgctgccgtggtgttgctgtgtctagtcatctttttgatctgcactgccaagcggatgcgggtcaaggcttatcgggttgacaagtctccgtataatcagtcgatgtattacgcaggccttcctgtggatgattttgaggactctgagtccacagacaccgaggaggagtttggtaatgctattggcggtagtcacggggggtcgtcatatacagtgtatatcgacaagactcgg

SEQ ID NO: 53 - DNA, 1869 bp, synthetic construct
  source 1..1869: mol_type = other DNA
atggggactgttaataagcctgtggtcggagtgttgatggggtttgggatcatcaccgggacattgaggatcacgaatcctgttcgtgcctcggtgttgcggtacgatgatttccacatagatgaggataagttggataccaattccgtttatgagccctattaccactctgaccacgccgaatcatcttgggtgaaccggggtgagtcttcgcgcaaggcttatgatcataattctccatacatatggccaagaaatgattatgatggtttcctggagaatgcccatgagcatcatggcgtttataaccaaggcagggggattgattctggagagcgtcttatgcagcctacccagatgtccgcccaggaggacctgggtgatgacactgggatccatgtgattccaactcttaatggtgacgatcgccataagattgtgaacgtggatcagaggcagtatggggacgtttttaagggcgatctcaatcctaagccgcagggacagaggctgatcgaggtttctgtggaggagaaccatccctttaccttgcgggctccaatccaaaggatctatggagtgaggtacacagaaacttggtcatttctgccctcgcttacctgcactggagatgctgctcccgctattcaacatatctgtctcaagcacaccacgtgcttccaggatgtggttgtagacgtcgattgcgctgagaataccaaggaggatcagctggctgagatcagttaccgcttccaggggaagaaggaagctgatcagccttggattgttgtgaatacgtctacactgtttgacgagcttgaactggaccctccagaaatcgagccaggtgtgttgaaagtgttgaggactgagaaacagtaccttggagtgtatatctggaatatgagaggttccgacgggacctctacatatgccactttcctcgtgacgtggaagggcgacgagaagactcggaatcccacgccggctgtgaccccacagccgcgtggggccgagtttcacatgtggaattatcattctcacgtgttctctgtgggcgacacgttcagtttggccatgcaccttcagtacaagatacacgaagccccttttgatcttctgctcgaatggctgtatgtgccaattgacccgacgtgtcagcccatgagattatactctacgtgtttatatcatccaaatgctccacagtgtttgagtcatatgaacagtgggtgtacgttcacaagtccccacctagcccagcgggtggcctcgacggtgtaccagaattgtgagcatgctgacaactatacggcatactgcctcggaattagccacatggagccaagcttcgggctgattctgcatgacggtggaactacacttaaattcgtggacactcctgagtcgcttagcgggttgtacgtgtttgtagtgtatttcaatggtcatgttgaggcagtggcttataccgttgtcagcactgttgatcattttgtgaacgccattgaggagcgggggttcccgcctacggctgggcaaccccccgctacgactaagcctaaggaaattaccccggtgaatccaggtacctcgcctcttatcaggtatgcagcctggaccggtggtctggctgcagtcgtgctactatgcctcgtgattttcttgatctgcactgctaaacgcatgcgtgtcaaggcttatagggtggataaatccccctataaccagtctatgtactatgctggccttcctgtggacgacttcgaggattcggagtcgaccgatacagaggaggagtttggcaatgcgatcggggggagtcacgggggtagtagctacactgtgtatatcgataagacgagg

SEQ ID NO: 54 - DNA, 1869 bp, synthetic construct
  source 1..1869: mol_type = other DNA
atggggactgttaataagccagttgtgggagttctgatggggttcggtatcatcactgggactctcaggattaccaatcctgttcgcgcctctgttttacgctatgatgactttcatattgatgaggataagctcgacacaaactctgtgtacgagccttattatcatagcgatcatgcagagtcgtcatgggtaaataggggtgagagttcccgcaaggcttatgatcataacagtccttatatctggccaagaaatgattacgatggtttcttggagaatgcccatgagcatcatggtgtttacaaccagggcagggggattgattctggagagcgtcttatgcagcctacccagatgtccgcccaggaggacctgggtgatgacactgggatccatgtgattccaactcttaatggtgacgatcgccataagattgtgaacgtggatcagaggcagtatggggacgtttttaagggcgatctcaatcctaagccgcagggacagaggctgatcgaggtttctgtggaggagaaccatccctttaccttgcgggctccaatccaaaggatctatggagtgaggtacacagaaacttggtcatttctgccctcgcttacctgcactggtgacgctgcccctgctattcagcatatatgccttaagcatacaacttgttttcaggatgtggtggtggatgttgattgcgctgagaataccaaggaagatcagcttgccgaaatttcttacagatttcagggcaaaaaggaagctgatcaaccttggattgttgtcaatacatccacgctttttgacgagctggagctcgatcccccggaaatcgagcctggcgtgttgaaggtgctgcgtactgagaagcaatatcttggggtgtatatctggaatatgcgggggtcggacggcaccagtacctatgccacctttctagtaacctggaagggtgacgagaagacccggaaccccacccctgctgtgactccgcagcctaggggtgcggagttccacatgtggaattaccattcccatgtgttttccgtgggtgatacgttcagtctggctatgcacctccagtataagatacacgaagctccttttgatcttctactggaatggctgtatgtgccgattgaccctacgtgtcagcccatgagattgtattcgacgtgtttgtatcatccaaatgctccacagtgtttgagtcatatgaacagcggatgcactttcaccagtcctcatctagcgcagcgcgtggcttccactgtctatcagaactgtgagcacgcagacaactatacagcctactgtctggggattagccacatggagccaagctttgggctgattcttcacgacggtggcaccacacttaagttcgtggacactcccgagtctttaagtgggttgtatgtttttgtggtttatttcaatggacacgtggaagccgtggcttacactgtggtgagtactgtggatcacttcgtgaatgccatcgaggagcgggggtttcctcctacggcaggacagccccccgcgaccacaaagcctaaggaaattaccccggtgaatccaggtacctcgcctcttatcaggtatgcagcctggaccggtggtctggctgcagtcgtgctactatgcctcgtgattttcttgatctgcactgctaaacgcatgcgtgtcaaggcttatagggtggataaatccccctataaccagtctatgtactatgctggccttcctgtggacgacttcgaggattcggagtcgaccgatacagaggaggagtttggcaatgcgatcggggggagtcacgggggtagtagctacactgtgtatatcgataagacgagg

SEQ ID NO: 55 - DNA, 1869 bp, synthetic construct
  source 1..1869: mol_type = other DNA
atggggactgttaataagccagttgtgggagttctgatggggttcggtatcatcactgggactctcaggattaccaatcctgttcgcgcctctgttttacgctatgatgactttcatattgatgaggataagctcgacacaaactctgtgtacgagccttattatcatagcgatcatgcagagtcgtcatgggtaaataggggtgagagttcccgcaaggcttatgatcataacagtccttatatctggccaagaaatgattacgatggtttcttggagaatgcccatgagcatcatggtgtttacaaccagggtcggggtatcgactctggcgagagattgatgcaaccgacccaaatgagtgcgcaggaggacctaggcgatgataccgggattcacgtgattcctactctgaatggcgacgacagacacaagattgtcaatgttgatcagcggcagtacggggatgtgttcaagggtgacctcaatccgaagcctcaggggcagaggctcattgaggtttcggttgaggagaatcatccttttacactccgtgctcctattcagaggatttacggggtccggtatacagagacctggtcttttctgccgtcacttacttgcactggagatgctgctcccgctattcaacatatctgtctcaagcacaccacgtgcttccaggatgtggttgtagacgtcgattgcgctgagaataccaaggaggatcagctggctgagatcagttaccgcttccaggggaagaaggaagctgatcagccttggattgttgtgaatacgtctacactgtttgacgagcttgaactggaccctccagaaatcgagccaggtgtgttgaaagtgttgaggactgagaaacagtaccttggagtgtatatctggaatatgagaggttccgacgggacctctacatatgccacctttctagtaacctggaagggtgacgagaagacccggaaccccacccctgctgtgactccgcagcctaggggtgcggagttccacatgtggaattaccattcccatgtgttttccgtgggtgatacgttcagtctggctatgcacctccagtataagatacacgaagctccttttgatcttctactggaatggctgtatgtgccgattgaccctacgtgtcagcccatgagattgtattcgacgtgtttgtatcatccaaatgctccacagtgtttgagtcatatgaacagcggatgcactttcaccagtccccacctagcccagcgggtggcctcgacggtgtaccagaattgtgagcatgctgacaactatacggcatactgcctcggaattagccacatggagccaagcttcgggctgattctgcatgacggtggaactacacttaaattcgtggacactcctgagtcgcttagcgggttgtacgtgtttgtagtgtatttcaatggtcatgttgaggcagtggcttataccgttgtcagcactgttgatcattttgtgaacgccattgaggagcgggggttcccgcctacggctgggcaaccccccgctacgactaagcctaaggaaattaccccggtgaatccaggtacctcgcctcttatcaggtatgcagcctggaccggtggtctggctgcagtcgtgctactatgcctcgtgattttcttgatctgcactgctaaacgcatgcgtgtcaaggcttatagggtggataaatccccctataaccagtctatgtactatgctggccttcctgtggacgacttcgaggattcggagtcgaccgatacagaggaggagtttggcaatgcgatcggggggagtcacgggggtagtagctacactgtgtatatcgataagacgagg

SEQ ID NO: 56 - DNA, 1869 bp, synthetic construct
  source 1..1869: mol_type = other DNA
atggggactgttaataagccagttgtgggagttctgatggggttcggtatcatcactgggactctcaggattaccaatcctgttcgcgcctctgttttacgctatgatgactttcatattgatgaggataagctcgacacaaactctgtgtacgagccttattatcatagcgatcatgcagagtcgtcatgggtaaataggggtgagagttcccgcaaggcttatgatcataacagtccttatatctggccaagaaatgattacgatggtttcttggagaatgcccatgagcatcatggtgtttacaaccagggcagggggattgattctggagagcgtcttatgcagcctacccagatgtccgcccaggaggacctgggtgatgacactgggatccatgtgattccaactcttaatggtgacgatcgccataagattgtgaacgtggatcagaggcagtatggggacgtttttaagggcgatctcaatcctaagccgcagggacagaggctgatcgaggtttctgtggaggagaaccatccctttaccttgcgggctccaatccaaaggatctatggagtgaggtacacagaaacttggtcatttctgccctcgcttacctgcactggagatgctgctcccgctattcaacatatctgtctcaagcacaccacgtgcttccaggatgtggttgtagacgtcgattgcgctgagaataccaaggaggatcagctggctgagatcagttaccgcttccaggggaagaaggaagctgatcagccttggattgttgtgaatacgtctacactgtttgacgagcttgaactggaccctccagaaatcgagccaggtgtgttgaaagtgttgaggactgagaaacagtaccttggagtgtatatctggaatatgagaggttccgacgggacctctacatatgccactttcctcgtgacgtggaagggcgacgagaagactcggaatcccacgccggctgtgaccccacagccgcgtggggccgagtttcacatgtggaattatcattctcacgtgttctctgtgggcgacacgttcagtttggccatgcaccttcagtacaagatacacgaagccccttttgatcttctgctcgaatggctgtatgtgccaattgacccgacgtgtcagcccatgagattatactctacgtgtttatatcatccaaatgctccacagtgtttgagtcatatgaacagtgggtgtacgttcacaagtccccacctagcccagcgggtggcctcgacggtgtaccagaattgtgagcatgctgacaactatacggcatactgcctcggaattagccacatggagccaagcttcgggctgattctgcatgacggtggaactacacttaaattcgtggacactcctgagtcgcttagcgggttgtacgtgtttgtagtgtatttcaatggtcatgttgaggcagtggcttataccgttgtcagcactgttgatcattttgtgaacgccattgaggagcgggggttcccgcctacggctgggcaaccccccgctacgactaagcccaaagagattacaccagtgaaccctggcacaagccccctgattaggtatgctgcctggacaggcgggcttgctgccgtggtgttgctgtgtctagtcatctttttgatctgcactgccaagcggatgcgggtcaaggcttatcgggttgacaagtctccgtataatcagtcgatgtattacgcaggccttcctgtggatgattttgaggactctgagtccacagacaccgaggaggagtttggtaatgctattggcggtagtcacggggggtcgtcatatacagtgtatatcgacaagactcgg

SEQ ID NO: 57 - DNA, 1869 bp, synthetic construct
  source 1..1869: mol_type = other DNA
atggggactgttaataagcctgtggtcggagtgttgatggggtttgggatcatcaccgggacattgaggatcacgaatcctgttcgtgcctcggtgttgcggtacgatgatttccacatagatgaggataagttggataccaattccgtttatgagccctattaccactctgaccacgccgaatcatcttgggtgaaccggggtgagtcttcgcgcaaggcttatgatcataattctccatacatatggccaagaaatgattatgatggtttcctggagaatgcccatgagcatcatggcgtttataaccaaggtcggggtatcgactctggcgagagattgatgcaaccgacccaaatgagtgcgcaggaggacctaggcgatgataccgggattcacgtgattcctactctgaatggcgacgacagacacaagattgtcaatgttgatcagcggcagtacggggatgtgttcaagggtgacctcaatccgaagcctcaggggcagaggctcattgaggtttcggttgaggagaatcatccttttacactccgtgctcctattcagaggatttacggggtccggtatacagagacctggtcttttctgccgtcacttacttgcactggagatgctgctcccgctattcaacatatctgtctcaagcacaccacgtgcttccaggatgtggttgtagacgtcgattgcgctgagaataccaaggaggatcagctggctgagatcagttaccgcttccaggggaagaaggaagctgatcagccttggattgttgtgaatacgtctacactgtttgacgagcttgaactggaccctccagaaatcgagccaggtgtgttgaaagtgttgaggactgagaaacagtaccttggagtgtatatctggaatatgagaggttccgacgggacctctacatatgccacctttctagtaacctggaagggtgacgagaagacccggaaccccacccctgctgtgactccgcagcctaggggtgcggagttccacatgtggaattaccattcccatgtgttttccgtgggtgatacgttcagtctggctatgcacctccagtataagatacacgaagctccttttgatcttctactggaatggctgtatgtgccgattgaccctacgtgtcagcccatgagattgtattcgacgtgtttgtatcatccaaatgctccacagtgtttgagtcatatgaacagcggatgcactttcaccagtccccacctagcccagcgggtggcctcgacggtgtaccagaattgtgagcatgctgacaactatacggcatactgcctcggaattagccacatggagccaagcttcgggctgattctgcatgacggtggaactacacttaaattcgtggacactcctgagtcgcttagcgggttgtacgtgtttgtagtgtatttcaatggtcatgttgaggcagtggcttataccgttgtcagcactgttgatcattttgtgaacgccattgaggagcgggggttcccgcctacggctgggcaaccccccgctacgactaagcccaaagagattacaccagtgaaccctggcacaagccccctgattaggtatgctgcctggacaggcgggcttgctgccgtggtgttgctgtgtctagtcatctttttgatctgcactgccaagcggatgcgggtcaaggcttatcgggttgacaagtctccgtataatcagtcgatgtattacgcaggccttcctgtggatgattttgaggactctgagtccacagacaccgaggaggagtttggtaatgctattggcggtagtcacggggggtcgtcatatacagtgtatatcgacaagactcgg

SEQ ID NO: 58 - DNA, 1869 bp, synthetic construct
  source 1..1869: mol_type = other DNA
atggggactgttaataagcctgtggtcggagtgttgatggggtttgggatcatcaccgggacattgaggatcacgaatcctgttcgtgcctcggtgttgcggtacgatgatttccacatagatgaggataagttggataccaattccgtttatgagccctattaccactctgaccacgccgaatcatcttgggtgaaccggggtgagtcttcgcgcaaggcttatgatcataattctccatacatatggccaagaaatgattatgatggtttcctggagaatgcccatgagcatcatggcgtttataaccaaggcagggggattgattctggagagcgtcttatgcagcctacccagatgtccgcccaggaggacctgggtgatgacactgggatccatgtgattccaactcttaatggtgacgatcgccataagattgtgaacgtggatcagaggcagtatggggacgtttttaagggcgatctcaatcctaagccgcagggacagaggctgatcgaggtttctgtggaggagaaccatccctttaccttgcgggctccaatccaaaggatctatggagtgaggtacacagaaacttggtcatttctgccctcgcttacctgcactggagatgctgctcccgctattcaacatatctgtctcaagcacaccacgtgcttccaggatgtggttgtagacgtcgattgcgctgagaataccaaggaggatcagctggctgagatcagttaccgcttccaggggaagaaggaagctgatcagccttggattgttgtgaatacgtctacactgtttgacgagcttgaactggaccctccagaaatcgagccaggtgtgttgaaagtgttgaggactgagaaacagtaccttggagtgtatatctggaatatgagaggttccgacgggacctctacatatgccacctttctagtaacctggaagggtgacgagaagacccggaaccccacccctgctgtgactccgcagcctaggggtgcggagttccacatgtggaattaccattcccatgtgttttccgtgggtgatacgttcagtctggctatgcacctccagtataagatacacgaagctccttttgatcttctactggaatggctgtatgtgccgattgaccctacgtgtcagcccatgagattgtattcgacgtgtttgtatcatccaaatgctccacagtgtttgagtcatatgaacagcggatgcactttcaccagtcctcatctagcgcagcgcgtggcttccactgtctatcagaactgtgagcacgcagacaactatacagcctactgtctggggattagccacatggagccaagctttgggctgattcttcacgacggtggcaccacacttaagttcgtggacactcccgagtctttaagtgggttgtatgtttttgtggtttatttcaatggacacgtggaagccgtggcttacactgtggtgagtactgtggatcacttcgtgaatgccatcgaggagcgggggtttcctcctacggcaggacagccccccgcgaccacaaagcctaaggaaattaccccggtgaatccaggtacctcgcctcttatcaggtatgcagcctggaccggtggtctggctgcagtcgtgctactatgcctcgtgattttcttgatctgcactgctaaacgcatgcgtgtcaaggcttatagggtggataaatccccctataaccagtctatgtactatgctggccttcctgtggacgacttcgaggattcggagtcgaccgatacagaggaggagtttggcaatgcgatcggggggagtcacgggggtagtagctacactgtgtatatcgataagacgagg

SEQ ID NO: 59 - DNA, 1869 bp, synthetic construct
  source 1..1869: mol_type = other DNA
atggggactgttaataagccagttgtgggagttctgatggggttcggtatcatcactgggactctcaggattaccaatcctgttcgcgcctctgttttacgctatgatgactttcatattgatgaggataagctcgacacaaactctgtgtacgagccttattatcatagcgatcatgcagagtcgtcatgggtaaataggggtgagagttcccgcaaggcttatgatcataacagtccttatatctggccaagaaatgattacgatggtttcttggagaatgcccatgagcatcatggtgtttacaaccagggtcggggtatcgactctggcgagagattgatgcaaccgacccaaatgagtgcgcaggaggacctaggcgatgataccgggattcacgtgattcctactctgaatggcgacgacagacacaagattgtcaatgttgatcagcggcagtacggggatgtgttcaagggtgacctcaatccgaagcctcaggggcagaggctcattgaggtttcggttgaggagaatcatccttttacactccgtgctcctattcagaggatttacggggtccggtatacagagacctggtcttttctgccgtcacttacttgcactggagatgctgctcccgctattcaacatatctgtctcaagcacaccacgtgcttccaggatgtggttgtagacgtcgattgcgctgagaataccaaggaggatcagctggctgagatcagttaccgcttccaggggaagaaggaagctgatcagccttggattgttgtgaatacgtctacactgtttgacgagcttgaactggaccctccagaaatcgagccaggtgtgttgaaagtgttgaggactgagaaacagtaccttggagtgtatatctggaatatgagaggttccgacgggacctctacatatgccacctttctagtaacctggaagggtgacgagaagacccggaaccccacccctgctgtgactccgcagcctaggggtgcggagttccacatgtggaattaccattcccatgtgttttccgtgggtgatacgttcagtctggctatgcacctccagtataagatacacgaagctccttttgatcttctactggaatggctgtatgtgccgattgaccctacgtgtcagcccatgagattgtattcgacgtgtttgtatcatccaaatgctccacagtgtttgagtcatatgaacagcggatgcactttcaccagtccccacctagcccagcgggtggcctcgacggtgtaccagaattgtgagcatgctgacaactatacggcatactgcctcggaattagccacatggagccaagcttcgggctgattctgcatgacggtggaactacacttaaattcgtggacactcctgagtcgcttagcgggttgtacgtgtttgtagtgtatttcaatggtcatgttgaggcagtggcttataccgttgtcagcactgttgatcattttgtgaacgccattgaggagcgggggttcccgcctacggctgggcaaccccccgctacgactaagcccaaagagattacaccagtgaaccctggcacaagccccctgattaggtatgctgcctggacaggcgggcttgctgccgtggtgttgctgtgtctagtcatctttttgatctgcactgccaagcggatgcgggtcaaggcttatcgggttgacaagtctccgtataatcagtcgatgtattacgcaggccttcctgtggatgattttgaggactctgagtccacagacaccgaggaggagtttggtaatgctattggcggtagtcacggggggtcgtcatatacagtgtatatcgacaagactcgg

SEQ ID NO: 60 - DNA, 1869 bp, synthetic construct
  source 1..1869: mol_type = other DNA
atggggactgttaataagccagttgtgggagttctgatggggttcggtatcatcactgggactctcaggattaccaatcctgttcgcgcctctgttttacgctatgatgactttcatattgatgaggataagctcgacacaaactctgtgtacgagccttattatcatagcgatcatgcagagtcgtcatgggtaaataggggtgagagttcccgcaaggcttatgatcataacagtccttatatctggccaagaaatgattacgatggtttcttggagaatgcccatgagcatcatggtgtttacaaccagggtcggggtatcgactctggcgagagattgatgcaaccgacccaaatgagtgcgcaggaggacctaggcgatgataccgggattcacgtgattcctactctgaatggcgacgacagacacaagattgtcaatgttgatcagcggcagtacggggatgtgttcaagggtgacctcaatccgaagcctcaggggcagaggctcattgaggtttcggttgaggagaatcatccttttacactccgtgctcctattcagaggatttacggggtccggtatacagagacctggtcttttctgccgtcacttacttgcactggtgacgctgcccctgctattcagcatatatgccttaagcatacaacttgttttcaggatgtggtggtggatgttgattgcgctgagaataccaaggaagatcagcttgccgaaatttcttacagatttcagggcaaaaaggaagctgatcaaccttggattgttgtcaatacatccacgctttttgacgagctggagctcgatcccccggaaatcgagcctggcgtgttgaaggtgctgcgtactgagaagcaatatcttggggtgtatatctggaatatgcgggggtcggacggcaccagtacctatgccacctttctagtaacctggaagggtgacgagaagacccggaaccccacccctgctgtgactccgcagcctaggggtgcggagttccacatgtggaattaccattcccatgtgttttccgtgggtgatacgttcagtctggctatgcacctccagtataagatacacgaagctccttttgatcttctactggaatggctgtatgtgccgattgaccctacgtgtcagcccatgagattgtattcgacgtgtttgtatcatccaaatgctccacagtgtttgagtcatatgaacagcggatgcactttcaccagtccccacctagcccagcgggtggcctcgacggtgtaccagaattgtgagcatgctgacaactatacggcatactgcctcggaattagccacatggagccaagcttcgggctgattctgcatgacggtggaactacacttaaattcgtggacactcctgagtcgcttagcgggttgtacgtgtttgtagtgtatttcaatggtcatgttgaggcagtggcttataccgttgtcagcactgttgatcattttgtgaacgccattgaggagcgggggttcccgcctacggctgggcaaccccccgctacgactaagcccaaagagattacaccagtgaaccctggcacaagccccctgattaggtatgctgcctggacaggcgggcttgctgccgtggtgttgctgtgtctagtcatctttttgatctgcactgccaagcggatgcgggtcaaggcttatcgggttgacaagtctccgtataatcagtcgatgtattacgcaggccttcctgtggatgattttgaggactctgagtccacagacaccgaggaggagtttggtaatgctattggcggtagtcacggggggtcgtcatatacagtgtatatcgacaagactcgg

SEQ ID NO: 61 - DNA, 1869 bp, synthetic construct
  source 1..1869: mol_type = other DNA
atggggactgttaataagcctgtggtcggagtgttgatggggtttgggatcatcaccgggacattgaggatcacgaatcctgttcgtgcctcggtgttgcggtacgatgatttccacatagatgaggataagttggataccaattccgtttatgagccctattaccactctgaccacgccgaatcatcttgggtgaaccggggtgagtcttcgcgcaaggcttatgatcataattctccatacatatggccaagaaatgattatgatggtttcctggagaatgcccatgagcatcatggcgtttataaccaaggtcggggtatcgactctggcgagagattgatgcaaccgacccaaatgagtgcgcaggaggacctaggcgatgataccgggattcacgtgattcctactctgaatggcgacgacagacacaagattgtcaatgttgatcagcggcagtacggggatgtgttcaagggtgacctcaatccgaagcctcaggggcagaggctcattgaggtttcggttgaggagaatcatccttttacactccgtgctcctattcagaggatttacggggtccggtatacagagacctggtcttttctgccgtcacttacttgcactggtgacgctgcccctgctattcagcatatatgccttaagcatacaacttgttttcaggatgtggtggtggatgttgattgcgctgagaataccaaggaagatcagcttgccgaaatttcttacagatttcagggcaaaaaggaagctgatcaaccttggattgttgtcaatacatccacgctttttgacgagctggagctcgatcccccggaaatcgagcctggcgtgttgaaggtgctgcgtactgagaagcaatatcttggggtgtatatctggaatatgcgggggtcggacggcaccagtacctatgccactttcctcgtgacgtggaagggcgacgagaagactcggaatcccacgccggctgtgaccccacagccgcgtggggccgagtttcacatgtggaattatcattctcacgtgttctctgtgggcgacacgttcagtttggccatgcaccttcagtacaagatacacgaagccccttttgatcttctgctcgaatggctgtatgtgccaattgacccgacgtgtcagcccatgagattatactctacgtgtttatatcatccaaatgctccacagtgtttgagtcatatgaacagtgggtgtacgttcacaagtccccacctagcccagcgggtggcctcgacggtgtaccagaattgtgagcatgctgacaactatacggcatactgcctcggaattagccacatggagccaagcttcgggctgattctgcatgacggtggaactacacttaaattcgtggacactcctgagtcgcttagcgggttgtacgtgtttgtagtgtatttcaatggtcatgttgaggcagtggcttataccgttgtcagcactgttgatcattttgtgaacgccattgaggagcgggggttcccgcctacggctgggcaaccccccgctacgactaagcctaaggaaattaccccggtgaatccaggtacctcgcctcttatcaggtatgcagcctggaccggtggtctggctgcagtcgtgctactatgcctcgtgattttcttgatctgcactgctaaacgcatgcgtgtcaaggcttatagggtggataaatccccctataaccagtctatgtactatgctggccttcctgtggacgacttcgaggattcggagtcgaccgatacagaggaggagtttggcaatgcgatcggggggagtcacgggggtagtagctacactgtgtatatcgataagacgagg

SEQ ID NO: 62 - DNA, 1869 bp, synthetic construct
  source 1..1869: mol_type = other DNA
atggggactgttaataagccagttgtgggagttctgatggggttcggtatcatcactgggactctcaggattaccaatcctgttcgcgcctctgttttacgctatgatgactttcatattgatgaggataagctcgacacaaactctgtgtacgagccttattatcatagcgatcatgcagagtcgtcatgggtaaataggggtgagagttcccgcaaggcttatgatcataacagtccttatatctggccaagaaatgattacgatggtttcttggagaatgcccatgagcatcatggtgtttacaaccagggcagggggattgattctggagagcgtcttatgcagcctacccagatgtccgcccaggaggacctgggtgatgacactgggatccatgtgattccaactcttaatggtgacgatcgccataagattgtgaacgtggatcagaggcagtatggggacgtttttaagggcgatctcaatcctaagccgcagggacagaggctgatcgaggtttctgtggaggagaaccatccctttaccttgcgggctccaatccaaaggatctatggagtgaggtacacagaaacttggtcatttctgccctcgcttacctgcactggtgacgctgcccctgctattcagcatatatgccttaagcatacaacttgttttcaggatgtggtggtggatgttgattgcgctgagaataccaaggaagatcagcttgccgaaatttcttacagatttcagggcaaaaaggaagctgatcaaccttggattgttgtcaatacatccacgctttttgacgagctggagctcgatcccccggaaatcgagcctggcgtgttgaaggtgctgcgtactgagaagcaatatcttggggtgtatatctggaatatgcgggggtcggacggcaccagtacctatgccacctttctagtaacctggaagggtgacgagaagacccggaaccccacccctgctgtgactccgcagcctaggggtgcggagttccacatgtggaattaccattcccatgtgttttccgtgggtgatacgttcagtctggctatgcacctccagtataagatacacgaagctccttttgatcttctactggaatggctgtatgtgccgattgaccctacgtgtcagcccatgagattgtattcgacgtgtttgtatcatccaaatgctccacagtgtttgagtcatatgaacagcggatgcactttcaccagtccccacctagcccagcgggtggcctcgacggtgtaccagaattgtgagcatgctgacaactatacggcatactgcctcggaattagccacatggagccaagcttcgggctgattctgcatgacggtggaactacacttaaattcgtggacactcctgagtcgcttagcgggttgtacgtgtttgtagtgtatttcaatggtcatgttgaggcagtggcttataccgttgtcagcactgttgatcattttgtgaacgccattgaggagcgggggttcccgcctacggctgggcaaccccccgctacgactaagcctaaggaaattaccccggtgaatccaggtacctcgcctcttatcaggtatgcagcctggaccggtggtctggctgcagtcgtgctactatgcctcgtgattttcttgatctgcactgctaaacgcatgcgtgtcaaggcttatagggtggataaatccccctataaccagtctatgtactatgctggccttcctgtggacgacttcgaggattcggagtcgaccgatacagaggaggagtttggcaatgcgatcggggggagtcacgggggtagtagctacactgtgtatatcgataagacgagg

SEQ ID NO: 63 - DNA, 1869 bp, synthetic construct
  source 1..1869: mol_type = other DNA
atggggactgttaataagcctgtggtcggagtgttgatggggtttgggatcatcaccgggacattgaggatcacgaatcctgttcgtgcctcggtgttgcggtacgatgatttccacatagatgaggataagttggataccaattccgtttatgagccctattaccactctgaccacgccgaatcatcttgggtgaaccggggtgagtcttcgcgcaaggcttatgatcataattctccatacatatggccaagaaatgattatgatggtttcctggagaatgcccatgagcatcatggcgtttataaccaaggcagggggattgattctggagagcgtcttatgcagcctacccagatgtccgcccaggaggacctgggtgatgacactgggatccatgtgattccaactcttaatggtgacgatcgccataagattgtgaacgtggatcagaggcagtatggggacgtttttaagggcgatctcaatcctaagccgcagggacagaggctgatcgaggtttctgtggaggagaaccatccctttaccttgcgggctccaatccaaaggatctatggagtgaggtacacagaaacttggtcatttctgccctcgcttacctgcactggtgacgctgcccctgctattcagcatatatgccttaagcatacaacttgttttcaggatgtggtggtggatgttgattgcgctgagaataccaaggaagatcagcttgccgaaatttcttacagatttcagggcaaaaaggaagctgatcaaccttggattgttgtcaatacatccacgctttttgacgagctggagctcgatcccccggaaatcgagcctggcgtgttgaaggtgctgcgtactgagaagcaatatcttggggtgtatatctggaatatgcgggggtcggacggcaccagtacctatgccacctttctagtaacctggaagggtgacgagaagacccggaaccccacccctgctgtgactccgcagcctaggggtgcggagttccacatgtggaattaccattcccatgtgttttccgtgggtgatacgttcagtctggctatgcacctccagtataagatacacgaagctccttttgatcttctactggaatggctgtatgtgccgattgaccctacgtgtcagcccatgagattgtattcgacgtgtttgtatcatccaaatgctccacagtgtttgagtcatatgaacagcggatgcactttcaccagtccccacctagcccagcgggtggcctcgacggtgtaccagaattgtgagcatgctgacaactatacggcatactgcctcggaattagccacatggagccaagcttcgggctgattctgcatgacggtggaactacacttaaattcgtggacactcctgagtcgcttagcgggttgtacgtgtttgtagtgtatttcaatggtcatgttgaggcagtggcttataccgttgtcagcactgttgatcattttgtgaacgccattgaggagcgggggttcccgcctacggctgggcaaccccccgctacgactaagcccaaagagattacaccagtgaaccctggcacaagccccctgattaggtatgctgcctggacaggcgggcttgctgccgtggtgttgctgtgtctagtcatctttttgatctgcactgccaagcggatgcgggtcaaggcttatcgggttgacaagtctccgtataatcagtcgatgtattacgcaggccttcctgtggatgattttgaggactctgagtccacagacaccgaggaggagtttggtaatgctattggcggtagtcacggggggtcgtcatatacagtgtatatcgacaagactcgg

SEQ ID NO: 64 - DNA, 1869 bp, synthetic construct
  source 1..1869: mol_type = other DNA
atggggactgttaataagcctgtggtcggagtgttgatggggtttgggatcatcaccgggacattgaggatcacgaatcctgttcgtgcctcggtgttgcggtacgatgatttccacatagatgaggataagttggataccaattccgtttatgagccctattaccactctgaccacgccgaatcatcttgggtgaaccggggtgagtcttcgcgcaaggcttatgatcataattctccatacatatggccaagaaatgattatgatggtttcctggagaatgcccatgagcatcatggcgtttataaccaaggtcggggtatcgactctggcgagagattgatgcaaccgacccaaatgagtgcgcaggaggacctaggcgatgataccgggattcacgtgattcctactctgaatggcgacgacagacacaagattgtcaatgttgatcagcggcagtacggggatgtgttcaagggtgacctcaatccgaagcctcaggggcagaggctcattgaggtttcggttgaggagaatcatccttttacactccgtgctcctattcagaggatttacggggtccggtatacagagacctggtcttttctgccgtcacttacttgcactggtgacgctgcccctgctattcagcatatatgccttaagcatacaacttgttttcaggatgtggtggtggatgttgattgcgctgagaataccaaggaagatcagcttgccgaaatttcttacagatttcagggcaaaaaggaagctgatcaaccttggattgttgtcaatacatccacgctttttgacgagctggagctcgatcccccggaaatcgagcctggcgtgttgaaggtgctgcgtactgagaagcaatatcttggggtgtatatctggaatatgcgggggtcggacggcaccagtacctatgccacctttctagtaacctggaagggtgacgagaagacccggaaccccacccctgctgtgactccgcagcctaggggtgcggagttccacatgtggaattaccattcccatgtgttttccgtgggtgatacgttcagtctggctatgcacctccagtataagatacacgaagctccttttgatcttctactggaatggctgtatgtgccgattgaccctacgtgtcagcccatgagattgtattcgacgtgtttgtatcatccaaatgctccacagtgtttgagtcatatgaacagcggatgcactttcaccagtcctcatctagcgcagcgcgtggcttccactgtctatcagaactgtgagcacgcagacaactatacagcctactgtctggggattagccacatggagccaagctttgggctgattcttcacgacggtggcaccacacttaagttcgtggacactcccgagtctttaagtgggttgtatgtttttgtggtttatttcaatggacacgtggaagccgtggcttacactgtggtgagtactgtggatcacttcgtgaatgccatcgaggagcgggggtttcctcctacggcaggacagccccccgcgaccacaaagcccaaagagattacaccagtgaaccctggcacaagccccctgattaggtatgctgcctggacaggcgggcttgctgccgtggtgttgctgtgtctagtcatctttttgatctgcactgccaagcggatgcgggtcaaggcttatcgggttgacaagtctccgtataatcagtcgatgtattacgcaggccttcctgtggatgattttgaggactctgagtccacagacaccgaggaggagtttggtaatgctattggcggtagtcacggggggtcgtcatatacagtgtatatcgacaagactcgg

SEQ ID NO: 65 - DNA, 1869 bp, synthetic construct
  source 1..1869: mol_type = other DNA
atggggactgttaataagccagttgtgggagttctgatggggttcggtatcatcactgggactctcaggattaccaatcctgttcgcgcctctgttttacgctatgatgactttcatattgatgaggataagctcgacacaaactctgtgtacgagccttattatcatagcgatcatgcagagtcgtcatgggtaaataggggtgagagttcccgcaaggcttatgatcataacagtccttatatctggccaagaaatgattacgatggtttcttggagaatgcccatgagcatcatggtgtttacaaccagggcagggggattgattctggagagcgtcttatgcagcctacccagatgtccgcccaggaggacctgggtgatgacactgggatccatgtgattccaactcttaatggtgacgatcgccataagattgtgaacgtggatcagaggcagtatggggacgtttttaagggcgatctcaatcctaagccgcagggacagaggctgatcgaggtttctgtggaggagaaccatccctttaccttgcgggctccaatccaaaggatctatggagtgaggtacacagaaacttggtcatttctgccctcgcttacctgcactggagatgctgctcccgctattcaacatatctgtctcaagcacaccacgtgcttccaggatgtggttgtagacgtcgattgcgctgagaataccaaggaggatcagctggctgagatcagttaccgcttccaggggaagaaggaagctgatcagccttggattgttgtgaatacgtctacactgtttgacgagcttgaactggaccctccagaaatcgagccaggtgtgttgaaagtgttgaggactgagaaacagtaccttggagtgtatatctggaatatgagaggttccgacgggacctctacatatgccacctttctagtaacctggaagggtgacgagaagacccggaaccccacccctgctgtgactccgcagcctaggggtgcggagttccacatgtggaattaccattcccatgtgttttccgtgggtgatacgttcagtctggctatgcacctccagtataagatacacgaagctccttttgatcttctactggaatggctgtatgtgccgattgaccctacgtgtcagcccatgagattgtattcgacgtgtttgtatcatccaaatgctccacagtgtttgagtcatatgaacagcggatgcactttcaccagtcctcatctagcgcagcgcgtggcttccactgtctatcagaactgtgagcacgcagacaactatacagcctactgtctggggattagccacatggagccaagctttgggctgattcttcacgacggtggcaccacacttaagttcgtggacactcccgagtctttaagtgggttgtatgtttttgtggtttatttcaatggacacgtggaagccgtggcttacactgtggtgagtactgtggatcacttcgtgaatgccatcgaggagcgggggtttcctcctacggcaggacagccccccgcgaccacaaagcccaaagagattacaccagtgaaccctggcacaagccccctgattaggtatgctgcctggacaggcgggcttgctgccgtggtgttgctgtgtctagtcatctttttgatctgcactgccaagcggatgcgggtcaaggcttatcgggttgacaagtctccgtataatcagtcgatgtattacgcaggccttcctgtggatgattttgaggactctgagtccacagacaccgaggaggagtttggtaatgctattggcggtagtcacggggggtcgtcatatacagtgtatatcgacaagactcgg

SEQ ID NO: 66 - DNA, 1869 bp, synthetic construct
  source 1..1869: mol_type = other DNA
atggggactgttaataagcctgtggtcggagtgttgatggggtttgggatcatcaccgggacattgaggatcacgaatcctgttcgtgcctcggtgttgcggtacgatgatttccacatagatgaggataagttggataccaattccgtttatgagccctattaccactctgaccacgccgaatcatcttgggtgaaccggggtgagtcttcgcgcaaggcttatgatcataattctccatacatatggccaagaaatgattatgatggtttcctggagaatgcccatgagcatcatggcgtttataaccaaggtcggggtatcgactctggcgagagattgatgcaaccgacccaaatgagtgcgcaggaggacctaggcgatgataccgggattcacgtgattcctactctgaatggcgacgacagacacaagattgtcaatgttgatcagcggcagtacggggatgtgttcaagggtgacctcaatccgaagcctcaggggcagaggctcattgaggtttcggttgaggagaatcatccttttacactccgtgctcctattcagaggatttacggggtccggtatacagagacctggtcttttctgccgtcacttacttgcactggagatgctgctcccgctattcaacatatctgtctcaagcacaccacgtgcttccaggatgtggttgtagacgtcgattgcgctgagaataccaaggaggatcagctggctgagatcagttaccgcttccaggggaagaaggaagctgatcagccttggattgttgtgaatacgtctacactgtttgacgagcttgaactggaccctccagaaatcgagccaggtgtgttgaaagtgttgaggactgagaaacagtaccttggagtgtatatctggaatatgagaggttccgacgggacctctacatatgccactttcctcgtgacgtggaagggcgacgagaagactcggaatcccacgccggctgtgaccccacagccgcgtggggccgagtttcacatgtggaattatcattctcacgtgttctctgtgggcgacacgttcagtttggccatgcaccttcagtacaagatacacgaagccccttttgatcttctgctcgaatggctgtatgtgccaattgacccgacgtgtcagcccatgagattatactctacgtgtttatatcatccaaatgctccacagtgtttgagtcatatgaacagtgggtgtacgttcacaagtccccacctagcccagcgggtggcctcgacggtgtaccagaattgtgagcatgctgacaactatacggcatactgcctcggaattagccacatggagccaagcttcgggctgattctgcatgacggtggaactacacttaaattcgtggacactcctgagtcgcttagcgggttgtacgtgtttgtagtgtatttcaatggtcatgttgaggcagtggcttataccgttgtcagcactgttgatcattttgtgaacgccattgaggagcgggggttcccgcctacggctgggcaaccccccgctacgactaagcccaaagagattacaccagtgaaccctggcacaagccccctgattaggtatgctgcctggacaggcgggcttgctgccgtggtgttgctgtgtctagtcatctttttgatctgcactgccaagcggatgcgggtcaaggcttatcgggttgacaagtctccgtataatcagtcgatgtattacgcaggccttcctgtggatgattttgaggactctgagtccacagacaccgaggaggagtttggtaatgctattggcggtagtcacggggggtcgtcatatacagtgtatatcgacaagactcgg

SEQ ID NO: 67 - DNA, 1869 bp, synthetic construct
  source 1..1869: mol_type = other DNA
atggggactgttaataagccagttgtgggagttctgatggggttcggtatcatcactgggactctcaggattaccaatcctgttcgcgcctctgttttacgctatgatgactttcatattgatgaggataagctcgacacaaactctgtgtacgagccttattatcatagcgatcatgcagagtcgtcatgggtaaataggggtgagagttcccgcaaggcttatgatcataacagtccttatatctggccaagaaatgattacgatggtttcttggagaatgcccatgagcatcatggtgtttacaaccagggcagggggattgattctggagagcgtcttatgcagcctacccagatgtccgcccaggaggacctgggtgatgacactgggatccatgtgattccaactcttaatggtgacgatcgccataagattgtgaacgtggatcagaggcagtatggggacgtttttaagggcgatctcaatcctaagccgcagggacagaggctgatcgaggtttctgtggaggagaaccatccctttaccttgcgggctccaatccaaaggatctatggagtgaggtacacagaaacttggtcatttctgccctcgcttacctgcactggagatgctgctcccgctattcaacatatctgtctcaagcacaccacgtgcttccaggatgtggttgtagacgtcgattgcgctgagaataccaaggaggatcagctggctgagatcagttaccgcttccaggggaagaaggaagctgatcagccttggattgttgtgaatacgtctacactgtttgacgagcttgaactggaccctccagaaatcgagccaggtgtgttgaaagtgttgaggactgagaaacagtaccttggagtgtatatctggaatatgagaggttccgacgggacctctacatatgccactttcctcgtgacgtggaagggcgacgagaagactcggaatcccacgccggctgtgaccccacagccgcgtggggccgagtttcacatgtggaattatcattctcacgtgttctctgtgggcgacacgttcagtttggccatgcaccttcagtacaagatacacgaagccccttttgatcttctgctcgaatggctgtatgtgccaattgacccgacgtgtcagcccatgagattatactctacgtgtttatatcatccaaatgctccacagtgtttgagtcatatgaacagtgggtgtacgttcacaagtccccacctagcccagcgggtggcctcgacggtgtaccagaattgtgagcatgctgacaactatacggcatactgcctcggaattagccacatggagccaagcttcgggctgattctgcatgacggtggaactacacttaaattcgtggacactcctgagtcgcttagcgggttgtacgtgtttgtagtgtatttcaatggtcatgttgaggcagtggcttataccgttgtcagcactgttgatcattttgtgaacgccattgaggagcgggggttcccgcctacggctgggcaaccccccgctacgactaagcctaaggaaattaccccggtgaatccaggtacctcgcctcttatcaggtatgcagcctggaccggtggtctggctgcagtcgtgctactatgcctcgtgattttcttgatctgcactgctaaacgcatgcgtgtcaaggcttatagggtggataaatccccctataaccagtctatgtactatgctggccttcctgtggacgacttcgaggattcggagtcgaccgatacagaggaggagtttggcaatgcgatcggggggagtcacgggggtagtagctacactgtgtatatcgataagacgagg

SEQ ID NO: 68 - DNA, 1869 bp, synthetic construct
  source 1..1869: mol_type = other DNA
atggggactgttaataagccagttgtgggagttctgatggggttcggtatcatcactgggactctcaggattaccaatcctgttcgcgcctctgttttacgctatgatgactttcatattgatgaggataagctcgacacaaactctgtgtacgagccttattatcatagcgatcatgcagagtcgtcatgggtaaataggggtgagagttcccgcaaggcttatgatcataacagtccttatatctggccaagaaatgattacgatggtttcttggagaatgcccatgagcatcatggtgtttacaaccagggcagggggattgattctggagagcgtcttatgcagcctacccagatgtccgcccaggaggacctgggtgatgacactgggatccatgtgattccaactcttaatggtgacgatcgccataagattgtgaacgtggatcagaggcagtatggggacgtttttaagggcgatctcaatcctaagccgcagggacagaggctgatcgaggtttctgtggaggagaaccatccctttaccttgcgggctccaatccaaaggatctatggagtgaggtacacagaaacttggtcatttctgccctcgcttacctgcactggagatgctgctcccgctattcaacatatctgtctcaagcacaccacgtgcttccaggatgtggttgtagacgtcgattgcgctgagaataccaaggaggatcagctggctgagatcagttaccgcttccaggggaagaaggaagctgatcagccttggattgttgtgaatacgtctacactgtttgacgagcttgaactggaccctccagaaatcgagccaggtgtgttgaaagtgttgaggactgagaaacagtaccttggagtgtatatctggaatatgagaggttccgacgggacctctacatatgccacctttctagtaacctggaagggtgacgagaagacccggaaccccacccctgctgtgactccgcagcctaggggtgcggagttccacatgtggaattaccattcccatgtgttttccgtgggtgatacgttcagtctggctatgcacctccagtataagatacacgaagctccttttgatcttctactggaatggctgtatgtgccgattgaccctacgtgtcagcccatgagattgtattcgacgtgtttgtatcatccaaatgctccacagtgtttgagtcatatgaacagcggatgcactttcaccagtccccacctagcccagcgggtggcctcgacggtgtaccagaattgtgagcatgctgacaactatacggcatactgcctcggaattagccacatggagccaagcttcgggctgattctgcatgacggtggaactacacttaaattcgtggacactcctgagtcgcttagcgggttgtacgtgtttgtagtgtatttcaatggtcatgttgaggcagtggcttataccgttgtcagcactgttgatcattttgtgaacgccattgaggagcgggggttcccgcctacggctgggcaaccccccgctacgactaagcctaaggaaattaccccggtgaatccaggtacctcgcctcttatcaggtatgcagcctggaccggtggtctggctgcagtcgtgctactatgcctcgtgattttcttgatctgcactgctaaacgcatgcgtgtcaaggcttatagggtggataaatccccctataaccagtctatgtactatgctggccttcctgtggacgacttcgaggattcggagtcgaccgatacagaggaggagtttggcaatgcgatcggggggagtcacgggggtagtagctacactgtgtatatcgataagacgagg

SEQ ID NO: 69 - DNA, 1869 bp, synthetic construct
  source 1..1869: mol_type = other DNA
atggggactgttaataagcctgtggtcggagtgttgatggggtttgggatcatcaccgggacattgaggatcacgaatcctgttcgtgcctcggtgttgcggtacgatgatttccacatagatgaggataagttggataccaattccgtttatgagccctattaccactctgaccacgccgaatcatcttgggtgaaccggggtgagtcttcgcgcaaggcttatgatcataattctccatacatatggccaagaaatgattatgatggtttcctggagaatgcccatgagcatcatggcgtttataaccaaggtcggggtatcgactctggcgagagattgatgcaaccgacccaaatgagtgcgcaggaggacctaggcgatgataccgggattcacgtgattcctactctgaatggcgacgacagacacaagattgtcaatgttgatcagcggcagtacggggatgtgttcaagggtgacctcaatccgaagcctcaggggcagaggctcattgaggtttcggttgaggagaatcatccttttacactccgtgctcctattcagaggatttacggggtccggtatacagagacctggtcttttctgccgtcacttacttgcactggagatgctgctcccgctattcaacatatctgtctcaagcacaccacgtgcttccaggatgtggttgtagacgtcgattgcgctgagaataccaaggaggatcagctggctgagatcagttaccgcttccaggggaagaaggaagctgatcagccttggattgttgtgaatacgtctacactgtttgacgagcttgaactggaccctccagaaatcgagccaggtgtgttgaaagtgttgaggactgagaaacagtaccttggagtgtatatctggaatatgagaggttccgacgggacctctacatatgccactttcctcgtgacgtggaagggcgacgagaagactcggaatcccacgccggctgtgaccccacagccgcgtggggccgagtttcacatgtggaattatcattctcacgtgttctctgtgggcgacacgttcagtttggccatgcaccttcagtacaagatacacgaagccccttttgatcttctgctcgaatggctgtatgtgccaattgacccgacgtgtcagcccatgagattatactctacgtgtttatatcatccaaatgctccacagtgtttgagtcatatgaacagtgggtgtacgttcacaagtccccacctagcccagcgggtggcctcgacggtgtaccagaattgtgagcatgctgacaactatacggcatactgcctcggaattagccacatggagccaagcttcgggctgattctgcatgacggtggaactacacttaaattcgtggacactcctgagtcgcttagcgggttgtacgtgtttgtagtgtatttcaatggtcatgttgaggcagtggcttataccgttgtcagcactgttgatcattttgtgaacgccattgaggagcgggggttcccgcctacggctgggcaaccccccgctacgactaagcctaaggaaattaccccggtgaatccaggtacctcgcctcttatcaggtatgcagcctggaccggtggtctggctgcagtcgtgctactatgcctcgtgattttcttgatctgcactgctaaacgcatgcgtgtcaaggcttatagggtggataaatccccctataaccagtctatgtactatgctggccttcctgtggacgacttcgaggattcggagtcgaccgatacagaggaggagtttggcaatgcgatcggggggagtcacgggggtagtagctacactgtgtatatcgataagacgagg

SEQ ID NO: 70 - DNA, 1869 bp, synthetic construct
  source 1..1869: mol_type = other DNA
atggggactgttaataagccagttgtgggagttctgatggggttcggtatcatcactgggactctcaggattaccaatcctgttcgcgcctctgttttacgctatgatgactttcatattgatgaggataagctcgacacaaactctgtgtacgagccttattatcatagcgatcatgcagagtcgtcatgggtaaataggggtgagagttcccgcaaggcttatgatcataacagtccttatatctggccaagaaatgattacgatggtttcttggagaatgcccatgagcatcatggtgtttacaaccagggtcggggtatcgactctggcgagagattgatgcaaccgacccaaatgagtgcgcaggaggacctaggcgatgataccgggattcacgtgattcctactctgaatggcgacgacagacacaagattgtcaatgttgatcagcggcagtacggggatgtgttcaagggtgacctcaatccgaagcctcaggggcagaggctcattgaggtttcggttgaggagaatcatccttttacactccgtgctcctattcagaggatttacggggtccggtatacagagacctggtcttttctgccgtcacttacttgcactggtgacgctgcccctgctattcagcatatatgccttaagcatacaacttgttttcaggatgtggtggtggatgttgattgcgctgagaataccaaggaagatcagcttgccgaaatttcttacagatttcagggcaaaaaggaagctgatcaaccttggattgttgtcaatacatccacgctttttgacgagctggagctcgatcccccggaaatcgagcctggcgtgttgaaggtgctgcgtactgagaagcaatatcttggggtgtatatctggaatatgcgggggtcggacggcaccagtacctatgccacctttctagtaacctggaagggtgacgagaagacccggaaccccacccctgctgtgactccgcagcctaggggtgcggagttccacatgtggaattaccattcccatgtgttttccgtgggtgatacgttcagtctggctatgcacctccagtataagatacacgaagctccttttgatcttctactggaatggctgtatgtgccgattgaccctacgtgtcagcccatgagattgtattcgacgtgtttgtatcatccaaatgctccacagtgtttgagtcatatgaacagcggatgcactttcaccagtcctcatctagcgcagcgcgtggcttccactgtctatcagaactgtgagcacgcagacaactatacagcctactgtctggggattagccacatggagccaagctttgggctgattcttcacgacggtggcaccacacttaagttcgtggacactcccgagtctttaagtgggttgtatgtttttgtggtttatttcaatggacacgtggaagccgtggcttacactgtggtgagtactgtggatcacttcgtgaatgccatcgaggagcgggggtttcctcctacggcaggacagccccccgcgaccacaaagcctaaggaaattaccccggtgaatccaggtacctcgcctcttatcaggtatgcagcctggaccggtggtctggctgcagtcgtgctactatgcctcgtgattttcttgatctgcactgctaaacgcatgcgtgtcaaggcttatagggtggataaatccccctataaccagtctatgtactatgctggccttcctgtggacgacttcgaggattcggagtcgaccgatacagaggaggagtttggcaatgcgatcggggggagtcacgggggtagtagctacactgtgtatatcgataagacgagg

SEQ ID NO: 71 - DNA, 1869 bp, synthetic construct
  source 1..1869: mol_type = other DNA
atggggactgttaataagcctgtggtcggagtgttgatggggtttgggatcatcaccgggacattgaggatcacgaatcctgttcgtgcctcggtgttgcggtacgatgatttccacatagatgaggataagttggataccaattccgtttatgagccctattaccactctgaccacgccgaatcatcttgggtgaaccggggtgagtcttcgcgcaaggcttatgatcataattctccatacatatggccaagaaatgattatgatggtttcctggagaatgcccatgagcatcatggcgtttataaccaaggcagggggattgattctggagagcgtcttatgcagcctacccagatgtccgcccaggaggacctgggtgatgacactgggatccatgtgattccaactcttaatggtgacgatcgccataagattgtgaacgtggatcagaggcagtatggggacgtttttaagggcgatctcaatcctaagccgcagggacagaggctgatcgaggtttctgtggaggagaaccatccctttaccttgcgggctccaatccaaaggatctatggagtgaggtacacagaaacttggtcatttctgccctcgcttacctgcactggagatgctgctcccgctattcaacatatctgtctcaagcacaccacgtgcttccaggatgtggttgtagacgtcgattgcgctgagaataccaaggaggatcagctggctgagatcagttaccgcttccaggggaagaaggaagctgatcagccttggattgttgtgaatacgtctacactgtttgacgagcttgaactggaccctccagaaatcgagccaggtgtgttgaaagtgttgaggactgagaaacagtaccttggagtgtatatctggaatatgagaggttccgacgggacctctacatatgccacctttctagtaacctggaagggtgacgagaagacccggaaccccacccctgctgtgactccgcagcctaggggtgcggagttccacatgtggaattaccattcccatgtgttttccgtgggtgatacgttcagtctggctatgcacctccagtataagatacacgaagctccttttgatcttctactggaatggctgtatgtgccgattgaccctacgtgtcagcccatgagattgtattcgacgtgtttgtatcatccaaatgctccacagtgtttgagtcatatgaacagcggatgcactttcaccagtccccacctagcccagcgggtggcctcgacggtgtaccagaattgtgagcatgctgacaactatacggcatactgcctcggaattagccacatggagccaagcttcgggctgattctgcatgacggtggaactacacttaaattcgtggacactcctgagtcgcttagcgggttgtacgtgtttgtagtgtatttcaatggtcatgttgaggcagtggcttataccgttgtcagcactgttgatcattttgtgaacgccattgaggagcgggggttcccgcctacggctgggcaaccccccgctacgactaagcctaaggaaattaccccggtgaatccaggtacctcgcctcttatcaggtatgcagcctggaccggtggtctggctgcagtcgtgctactatgcctcgtgattttcttgatctgcactgctaaacgcatgcgtgtcaaggcttatagggtggataaatccccctataaccagtctatgtactatgctggccttcctgtggacgacttcgaggattcggagtcgaccgatacagaggaggagtttggcaatgcgatcggggggagtcacgggggtagtagctacactgtgtatatcgataagacgagg

SEQ ID NO: 72 - DNA, 1869 bp, synthetic construct
  source 1..1869: mol_type = other DNA
atggggactgttaataagcctgtggtcggagtgttgatggggtttgggatcatcaccgggacattgaggatcacgaatcctgttcgtgcctcggtgttgcggtacgatgatttccacatagatgaggataagttggataccaattccgtttatgagccctattaccactctgaccacgccgaatcatcttgggtgaaccggggtgagtcttcgcgcaaggcttatgatcataattctccatacatatggccaagaaatgattatgatggtttcctggagaatgcccatgagcatcatggcgtttataaccaaggcagggggattgattctggagagcgtcttatgcagcctacccagatgtccgcccaggaggacctgggtgatgacactgggatccatgtgattccaactcttaatggtgacgatcgccataagattgtgaacgtggatcagaggcagtatggggacgtttttaagggcgatctcaatcctaagccgcagggacagaggctgatcgaggtttctgtggaggagaaccatccctttaccttgcgggctccaatccaaaggatctatggagtgaggtacacagaaacttggtcatttctgccctcgcttacctgcactggagatgctgctcccgctattcaacatatctgtctcaagcacaccacgtgcttccaggatgtggttgtagacgtcgattgcgctgagaataccaaggaggatcagctggctgagatcagttaccgcttccaggggaagaaggaagctgatcagccttggattgttgtgaatacgtctacactgtttgacgagcttgaactggaccctccagaaatcgagccaggtgtgttgaaagtgttgaggactgagaaacagtaccttggagtgtatatctggaatatgagaggttccgacgggacctctacatatgccacctttctagtaacctggaagggtgacgagaagacccggaaccccacccctgctgtgactccgcagcctaggggtgcggagttccacatgtggaattaccattcccatgtgttttccgtgggtgatacgttcagtctggctatgcacctccagtataagatacacgaagctccttttgatcttctactggaatggctgtatgtgccgattgaccctacgtgtcagcccatgagattgtattcgacgtgtttgtatcatccaaatgctccacagtgtttgagtcatatgaacagcggatgcactttcaccagtcctcatctagcgcagcgcgtggcttccactgtctatcagaactgtgagcacgcagacaactatacagcctactgtctggggattagccacatggagccaagctttgggctgattcttcacgacggtggcaccacacttaagttcgtggacactcccgagtctttaagtgggttgtatgtttttgtggtttatttcaatggacacgtggaagccgtggcttacactgtggtgagtactgtggatcacttcgtgaatgccatcgaggagcgggggtttcctcctacggcaggacagccccccgcgaccacaaagcccaaagagattacaccagtgaaccctggcacaagccccctgattaggtatgctgcctggacaggcgggcttgctgccgtggtgttgctgtgtctagtcatctttttgatctgcactgccaagcggatgcgggtcaaggcttatcgggttgacaagtctccgtataatcagtcgatgtattacgcaggccttcctgtggatgattttgaggactctgagtccacagacaccgaggaggagtttggtaatgctattggcggtagtcacggggggtcgtcatatacagtgtatatcgacaagactcgg

SEQ ID NO: 73 - DNA, 1869 bp, synthetic construct
  source 1..1869: mol_type = other DNA
atggggactgttaataagcctgtggtcggagtgttgatggggtttgggatcatcaccgggacattgaggatcacgaatcctgttcgtgcctcggtgttgcggtacgatgatttccacatagatgaggataagttggataccaattccgtttatgagccctattaccactctgaccacgccgaatcatcttgggtgaaccggggtgagtcttcgcgcaaggcttatgatcataattctccatacatatggccaagaaatgattatgatggtttcctggagaatgcccatgagcatcatggcgtttataaccaaggtcggggtatcgactctggcgagagattgatgcaaccgacccaaatgagtgcgcaggaggacctaggcgatgataccgggattcacgtgattcctactctgaatggcgacgacagacacaagattgtcaatgttgatcagcggcagtacggggatgtgttcaagggtgacctcaatccgaagcctcaggggcagaggctcattgaggtttcggttgaggagaatcatccttttacactccgtgctcctattcagaggatttacggggtccggtatacagagacctggtcttttctgccgtcacttacttgcactggtgacgctgcccctgctattcagcatatatgccttaagcatacaacttgttttcaggatgtggtggtggatgttgattgcgctgagaataccaaggaagatcagcttgccgaaatttcttacagatttcagggcaaaaaggaagctgatcaaccttggattgttgtcaatacatccacgctttttgacgagctggagctcgatcccccggaaatcgagcctggcgtgttgaaggtgctgcgtactgagaagcaatatcttggggtgtatatctggaatatgcgggggtcggacggcaccagtacctatgccactttcctcgtgacgtggaagggcgacgagaagactcggaatcccacgccggctgtgaccccacagccgcgtggggccgagtttcacatgtggaattatcattctcacgtgttctctgtgggcgacacgttcagtttggccatgcaccttcagtacaagatacacgaagccccttttgatcttctgctcgaatggctgtatgtgccaattgacccgacgtgtcagcccatgagattatactctacgtgtttatatcatccaaatgctccacagtgtttgagtcatatgaacagtgggtgtacgttcacaagtcctcatctagcgcagcgcgtggcttccactgtctatcagaactgtgagcacgcagacaactatacagcctactgtctggggattagccacatggagccaagctttgggctgattcttcacgacggtggcaccacacttaagttcgtggacactcccgagtctttaagtgggttgtatgtttttgtggtttatttcaatggacacgtggaagccgtggcttacactgtggtgagtactgtggatcacttcgtgaatgccatcgaggagcgggggtttcctcctacggcaggacagccccccgcgaccacaaagcctaaggaaattaccccggtgaatccaggtacctcgcctcttatcaggtatgcagcctggaccggtggtctggctgcagtcgtgctactatgcctcgtgattttcttgatctgcactgctaaacgcatgcgtgtcaaggcttatagggtggataaatccccctataaccagtctatgtactatgctggccttcctgtggacgacttcgaggattcggagtcgaccgatacagaggaggagtttggcaatgcgatcggggggagtcacgggggtagtagctacactgtgtatatcgataagacgagg

SEQ ID NO: 74 - DNA, 1869 bp, synthetic construct
  source 1..1869: mol_type = other DNA
atggggactgttaataagcctgtggtcggagtgttgatggggtttgggatcatcaccgggacattgaggatcacgaatcctgttcgtgcctcggtgttgcggtacgatgatttccacatagatgaggataagttggataccaattccgtttatgagccctattaccactctgaccacgccgaatcatcttgggtgaaccggggtgagtcttcgcgcaaggcttatgatcataattctccatacatatggccaagaaatgattatgatggtttcctggagaatgcccatgagcatcatggcgtttataaccaaggcagggggattgattctggagagcgtcttatgcagcctacccagatgtccgcccaggaggacctgggtgatgacactgggatccatgtgattccaactcttaatggtgacgatcgccataagattgtgaacgtggatcagaggcagtatggggacgtttttaagggcgatctcaatcctaagccgcagggacagaggctgatcgaggtttctgtggaggagaaccatccctttaccttgcgggctccaatccaaaggatctatggagtgaggtacacagaaacttggtcatttctgccctcgcttacctgcactggtgacgctgcccctgctattcagcatatatgccttaagcatacaacttgttttcaggatgtggtggtggatgttgattgcgctgagaataccaaggaagatcagcttgccgaaatttcttacagatttcagggcaaaaaggaagctgatcaaccttggattgttgtcaatacatccacgctttttgacgagctggagctcgatcccccggaaatcgagcctggcgtgttgaaggtgctgcgtactgagaagcaatatcttggggtgtatatctggaatatgcgggggtcggacggcaccagtacctatgccacctttctagtaacctggaagggtgacgagaagacccggaaccccacccctgctgtgactccgcagcctaggggtgcggagttccacatgtggaattaccattcccatgtgttttccgtgggtgatacgttcagtctggctatgcacctccagtataagatacacgaagctccttttgatcttctactggaatggctgtatgtgccgattgaccctacgtgtcagcccatgagattgtattcgacgtgtttgtatcatccaaatgctccacagtgtttgagtcatatgaacagcggatgcactttcaccagtcctcatctagcgcagcgcgtggcttccactgtctatcagaactgtgagcacgcagacaactatacagcctactgtctggggattagccacatggagccaagctttgggctgattcttcacgacggtggcaccacacttaagttcgtggacactcccgagtctttaagtgggttgtatgtttttgtggtttatttcaatggacacgtggaagccgtggcttacactgtggtgagtactgtggatcacttcgtgaatgccatcgaggagcgggggtttcctcctacggcaggacagccccccgcgaccacaaagcctaaggaaattaccccggtgaatccaggtacctcgcctcttatcaggtatgcagcctggaccggtggtctggctgcagtcgtgctactatgcctcgtgattttcttgatctgcactgctaaacgcatgcgtgtcaaggcttatagggtggataaatccccctataaccagtctatgtactatgctggccttcctgtggacgacttcgaggattcggagtcgaccgatacagaggaggagtttggcaatgcgatcggggggagtcacgggggtagtagctacactgtgtatatcgataagacgagg

SEQ ID NO: 75 - DNA, 1869 bp, synthetic construct
  source 1..1869: mol_type = other DNA
atggggactgttaataagcctgtggtcggagtgttgatggggtttgggatcatcaccgggacattgaggatcacgaatcctgttcgtgcctcggtgttgcggtacgatgatttccacatagatgaggataagttggataccaattccgtttatgagccctattaccactctgaccacgccgaatcatcttgggtgaaccggggtgagtcttcgcgcaaggcttatgatcataattctccatacatatggccaagaaatgattatgatggtttcctggagaatgcccatgagcatcatggcgtttataaccaaggcagggggattgattctggagagcgtcttatgcagcctacccagatgtccgcccaggaggacctgggtgatgacactgggatccatgtgattccaactcttaatggtgacgatcgccataagattgtgaacgtggatcagaggcagtatggggacgtttttaagggcgatctcaatcctaagccgcagggacagaggctgatcgaggtttctgtggaggagaaccatccctttaccttgcgggctccaatccaaaggatctatggagtgaggtacacagaaacttggtcatttctgccctcgcttacctgcactggtgacgctgcccctgctattcagcatatatgccttaagcatacaacttgttttcaggatgtggtggtggatgttgattgcgctgagaataccaaggaagatcagcttgccgaaatttcttacagatttcagggcaaaaaggaagctgatcaaccttggattgttgtcaatacatccacgctttttgacgagctggagctcgatcccccggaaatcgagcctggcgtgttgaaggtgctgcgtactgagaagcaatatcttggggtgtatatctggaatatgcgggggtcggacggcaccagtacctatgccacctttctagtaacctggaagggtgacgagaagacccggaaccccacccctgctgtgactccgcagcctaggggtgcggagttccacatgtggaattaccattcccatgtgttttccgtgggtgatacgttcagtctggctatgcacctccagtataagatacacgaagctccttttgatcttctactggaatggctgtatgtgccgattgaccctacgtgtcagcccatgagattgtattcgacgtgtttgtatcatccaaatgctccacagtgtttgagtcatatgaacagcggatgcactttcaccagtccccacctagcccagcgggtggcctcgacggtgtaccagaattgtgagcatgctgacaactatacggcatactgcctcggaattagccacatggagccaagcttcgggctgattctgcatgacggtggaactacacttaaattcgtggacactcctgagtcgcttagcgggttgtacgtgtttgtagtgtatttcaatggtcatgttgaggcagtggcttataccgttgtcagcactgttgatcattttgtgaacgccattgaggagcgggggttcccgcctacggctgggcaaccccccgctacgactaagcctaaggaaattaccccggtgaatccaggtacctcgcctcttatcaggtatgcagcctggaccggtggtctggctgcagtcgtgctactatgcctcgtgattttcttgatctgcactgctaaacgcatgcgtgtcaaggcttatagggtggataaatccccctataaccagtctatgtactatgctggccttcctgtggacgacttcgaggattcggagtcgaccgatacagaggaggagtttggcaatgcgatcggggggagtcacgggggtagtagctacactgtgtatatcgataagacgagg

SEQ ID NO: 76 - DNA, 1869 bp, synthetic construct
  source 1..1869: mol_type = other DNA
atggggactgttaataagccagttgtgggagttctgatggggttcggtatcatcactgggactctcaggattaccaatcctgttcgcgcctctgttttacgctatgatgactttcatattgatgaggataagctcgacacaaactctgtgtacgagccttattatcatagcgatcatgcagagtcgtcatgggtaaataggggtgagagttcccgcaaggcttatgatcataacagtccttatatctggccaagaaatgattacgatggtttcttggagaatgcccatgagcatcatggtgtttacaaccagggcagggggattgattctggagagcgtcttatgcagcctacccagatgtccgcccaggaggacctgggtgatgacactgggatccatgtgattccaactcttaatggtgacgatcgccataagattgtgaacgtggatcagaggcagtatggggacgtttttaagggcgatctcaatcctaagccgcagggacagaggctgatcgaggtttctgtggaggagaaccatccctttaccttgcgggctccaatccaaaggatctatggagtgaggtacacagaaacttggtcatttctgccctcgcttacctgcactggagatgctgctcccgctattcaacatatctgtctcaagcacaccacgtgcttccaggatgtggttgtagacgtcgattgcgctgagaataccaaggaggatcagctggctgagatcagttaccgcttccaggggaagaaggaagctgatcagccttggattgttgtgaatacgtctacactgtttgacgagcttgaactggaccctccagaaatcgagccaggtgtgttgaaagtgttgaggactgagaaacagtaccttggagtgtatatctggaatatgagaggttccgacgggacctctacatatgccactttcctcgtgacgtggaagggcgacgagaagactcggaatcccacgccggctgtgaccccacagccgcgtggggccgagtttcacatgtggaattatcattctcacgtgttctctgtgggcgacacgttcagtttggccatgcaccttcagtacaagatacacgaagccccttttgatcttctgctcgaatggctgtatgtgccaattgacccgacgtgtcagcccatgagattatactctacgtgtttatatcatccaaatgctccacagtgtttgagtcatatgaacagtgggtgtacgttcacaagtcctcatctagcgcagcgcgtggcttccactgtctatcagaactgtgagcacgcagacaactatacagcctactgtctggggattagccacatggagccaagctttgggctgattcttcacgacggtggcaccacacttaagttcgtggacactcccgagtctttaagtgggttgtatgtttttgtggtttatttcaatggacacgtggaagccgtggcttacactgtggtgagtactgtggatcacttcgtgaatgccatcgaggagcgggggtttcctcctacggcaggacagccccccgcgaccacaaagcccaaagagattacaccagtgaaccctggcacaagccccctgattaggtatgctgcctggacaggcgggcttgctgccgtggtgttgctgtgtctagtcatctttttgatctgcactgccaagcggatgcgggtcaaggcttatcgggttgacaagtctccgtataatcagtcgatgtattacgcaggccttcctgtggatgattttgaggactctgagtccacagacaccgaggaggagtttggtaatgctattggcggtagtcacggggggtcgtcatatacagtgtatatcgacaagactcgg

SEQ ID NO: 77 - DNA, 1869 bp, synthetic construct
  source 1..1869: mol_type = other DNA
atggggactgttaataagccagttgtgggagttctgatggggttcggtatcatcactgggactctcaggattaccaatcctgttcgcgcctctgttttacgctatgatgactttcatattgatgaggataagctcgacacaaactctgtgtacgagccttattatcatagcgatcatgcagagtcgtcatgggtaaataggggtgagagttcccgcaaggcttatgatcataacagtccttatatctggccaagaaatgattacgatggtttcttggagaatgcccatgagcatcatggtgtttacaaccagggtcggggtatcgactctggcgagagattgatgcaaccgacccaaatgagtgcgcaggaggacctaggcgatgataccgggattcacgtgattcctactctgaatggcgacgacagacacaagattgtcaatgttgatcagcggcagtacggggatgtgttcaagggtgacctcaatccgaagcctcaggggcagaggctcattgaggtttcggttgaggagaatcatccttttacactccgtgctcctattcagaggatttacggggtccggtatacagagacctggtcttttctgccgtcacttacttgcactggagatgctgctcccgctattcaacatatctgtctcaagcacaccacgtgcttccaggatgtggttgtagacgtcgattgcgctgagaataccaaggaggatcagctggctgagatcagttaccgcttccaggggaagaaggaagctgatcagccttggattgttgtgaatacgtctacactgtttgacgagcttgaactggaccctccagaaatcgagccaggtgtgttgaaagtgttgaggactgagaaacagtaccttggagtgtatatctggaatatgagaggttccgacgggacctctacatatgccactttcctcgtgacgtggaagggcgacgagaagactcggaatcccacgccggctgtgaccccacagccgcgtggggccgagtttcacatgtggaattatcattctcacgtgttctctgtgggcgacacgttcagtttggccatgcaccttcagtacaagatacacgaagccccttttgatcttctgctcgaatggctgtatgtgccaattgacccgacgtgtcagcccatgagattatactctacgtgtttatatcatccaaatgctccacagtgtttgagtcatatgaacagtgggtgtacgttcacaagtccccacctagcccagcgggtggcctcgacggtgtaccagaattgtgagcatgctgacaactatacggcatactgcctcggaattagccacatggagccaagcttcgggctgattctgcatgacggtggaactacacttaaattcgtggacactcctgagtcgcttagcgggttgtacgtgtttgtagtgtatttcaatggtcatgttgaggcagtggcttataccgttgtcagcactgttgatcattttgtgaacgccattgaggagcgggggttcccgcctacggctgggcaaccccccgctacgactaagcctaaggaaattaccccggtgaatccaggtacctcgcctcttatcaggtatgcagcctggaccggtggtctggctgcagtcgtgctactatgcctcgtgattttcttgatctgcactgctaaacgcatgcgtgtcaaggcttatagggtggataaatccccctataaccagtctatgtactatgctggccttcctgtggacgacttcgaggattcggagtcgaccgatacagaggaggagtttggcaatgcgatcggggggagtcacgggggtagtagctacactgtgtatatcgataagacgagg

SEQ ID NO: 78 - DNA, 1869 bp, synthetic construct
  source 1..1869: mol_type = other DNA
atggggactgttaataagcctgtggtcggagtgttgatggggtttgggatcatcaccgggacattgaggatcacgaatcctgttcgtgcctcggtgttgcggtacgatgatttccacatagatgaggataagttggataccaattccgtttatgagccctattaccactctgaccacgccgaatcatcttgggtgaaccggggtgagtcttcgcgcaaggcttatgatcataattctccatacatatggccaagaaatgattatgatggtttcctggagaatgcccatgagcatcatggcgtttataaccaaggcagggggattgattctggagagcgtcttatgcagcctacccagatgtccgcccaggaggacctgggtgatgacactgggatccatgtgattccaactcttaatggtgacgatcgccataagattgtgaacgtggatcagaggcagtatggggacgtttttaagggcgatctcaatcctaagccgcagggacagaggctgatcgaggtttctgtggaggagaaccatccctttaccttgcgggctccaatccaaaggatctatggagtgaggtacacagaaacttggtcatttctgccctcgcttacctgcactggagatgctgctcccgctattcaacatatctgtctcaagcacaccacgtgcttccaggatgtggttgtagacgtcgattgcgctgagaataccaaggaggatcagctggctgagatcagttaccgcttccaggggaagaaggaagctgatcagccttggattgttgtgaatacgtctacactgtttgacgagcttgaactggaccctccagaaatcgagccaggtgtgttgaaagtgttgaggactgagaaacagtaccttggagtgtatatctggaatatgagaggttccgacgggacctctacatatgccactttcctcgtgacgtggaagggcgacgagaagactcggaatcccacgccggctgtgaccccacagccgcgtggggccgagtttcacatgtggaattatcattctcacgtgttctctgtgggcgacacgttcagtttggccatgcaccttcagtacaagatacacgaagccccttttgatcttctgctcgaatggctgtatgtgccaattgacccgacgtgtcagcccatgagattatactctacgtgtttatatcatccaaatgctccacagtgtttgagtcatatgaacagtgggtgtacgttcacaagtccccacctagcccagcgggtggcctcgacggtgtaccagaattgtgagcatgctgacaactatacggcatactgcctcggaattagccacatggagccaagcttcgggctgattctgcatgacggtggaactacacttaaattcgtggacactcctgagtcgcttagcgggttgtacgtgtttgtagtgtatttcaatggtcatgttgaggcagtggcttataccgttgtcagcactgttgatcattttgtgaacgccattgaggagcgggggttcccgcctacggctgggcaaccccccgctacgactaagcccaaagagattacaccagtgaaccctggcacaagccccctgattaggtatgctgcctggacaggcgggcttgctgccgtggtgttgctgtgtctagtcatctttttgatctgcactgccaagcggatgcgggtcaaggcttatcgggttgacaagtctccgtataatcagtcgatgtattacgcaggccttcctgtggatgattttgaggactctgagtccacagacaccgaggaggagtttggtaatgctattggcggtagtcacggggggtcgtcatatacagtgtatatcgacaagactcgg

SEQ ID NO: 79 - DNA, 1869 bp, synthetic construct
  source 1..1869: mol_type = other DNA
atggggactgttaataagccagttgtgggagttctgatggggttcggtatcatcactgggactctcaggattaccaatcctgttcgcgcctctgttttacgctatgatgactttcatattgatgaggataagctcgacacaaactctgtgtacgagccttattatcatagcgatcatgcagagtcgtcatgggtaaataggggtgagagttcccgcaaggcttatgatcataacagtccttatatctggccaagaaatgattacgatggtttcttggagaatgcccatgagcatcatggtgtttacaaccagggcagggggattgattctggagagcgtcttatgcagcctacccagatgtccgcccaggaggacctgggtgatgacactgggatccatgtgattccaactcttaatggtgacgatcgccataagattgtgaacgtggatcagaggcagtatggggacgtttttaagggcgatctcaatcctaagccgcagggacagaggctgatcgaggtttctgtggaggagaaccatccctttaccttgcgggctccaatccaaaggatctatggagtgaggtacacagaaacttggtcatttctgccctcgcttacctgcactggtgacgctgcccctgctattcagcatatatgccttaagcatacaacttgttttcaggatgtggtggtggatgttgattgcgctgagaataccaaggaagatcagcttgccgaaatttcttacagatttcagggcaaaaaggaagctgatcaaccttggattgttgtcaatacatccacgctttttgacgagctggagctcgatcccccggaaatcgagcctggcgtgttgaaggtgctgcgtactgagaagcaatatcttggggtgtatatctggaatatgcgggggtcggacggcaccagtacctatgccacctttctagtaacctggaagggtgacgagaagacccggaaccccacccctgctgtgactccgcagcctaggggtgcggagttccacatgtggaattaccattcccatgtgttttccgtgggtgatacgttcagtctggctatgcacctccagtataagatacacgaagctccttttgatcttctactggaatggctgtatgtgccgattgaccctacgtgtcagcccatgagattgtattcgacgtgtttgtatcatccaaatgctccacagtgtttgagtcatatgaacagcggatgcactttcaccagtcctcatctagcgcagcgcgtggcttccactgtctatcagaactgtgagcacgcagacaactatacagcctactgtctggggattagccacatggagccaagctttgggctgattcttcacgacggtggcaccacacttaagttcgtggacactcccgagtctttaagtgggttgtatgtttttgtggtttatttcaatggacacgtggaagccgtggcttacactgtggtgagtactgtggatcacttcgtgaatgccatcgaggagcgggggtttcctcctacggcaggacagccccccgcgaccacaaagcccaaagagattacaccagtgaaccctggcacaagccccctgattaggtatgctgcctggacaggcgggcttgctgccgtggtgttgctgtgtctagtcatctttttgatctgcactgccaagcggatgcgggtcaaggcttatcgggttgacaagtctccgtataatcagtcgatgtattacgcaggccttcctgtggatgattttgaggactctgagtccacagacaccgaggaggagtttggtaatgctattggcggtagtcacggggggtcgtcatatacagtgtatatcgacaagactcgg

SEQ ID NO: 80 - DNA, 1869 bp, synthetic construct
  source 1..1869: mol_type = other DNA
atggggactgttaataagcctgtggtcggagtgttgatggggtttgggatcatcaccgggacattgaggatcacgaatcctgttcgtgcctcggtgttgcggtacgatgatttccacatagatgaggataagttggataccaattccgtttatgagccctattaccactctgaccacgccgaatcatcttgggtgaaccggggtgagtcttcgcgcaaggcttatgatcataattctccatacatatggccaagaaatgattatgatggtttcctggagaatgcccatgagcatcatggcgtttataaccaaggtcggggtatcgactctggcgagagattgatgcaaccgacccaaatgagtgcgcaggaggacctaggcgatgataccgggattcacgtgattcctactctgaatggcgacgacagacacaagattgtcaatgttgatcagcggcagtacggggatgtgttcaagggtgacctcaatccgaagcctcaggggcagaggctcattgaggtttcggttgaggagaatcatccttttacactccgtgctcctattcagaggatttacggggtccggtatacagagacctggtcttttctgccgtcacttacttgcactggtgacgctgcccctgctattcagcatatatgccttaagcatacaacttgttttcaggatgtggtggtggatgttgattgcgctgagaataccaaggaagatcagcttgccgaaatttcttacagatttcagggcaaaaaggaagctgatcaaccttggattgttgtcaatacatccacgctttttgacgagctggagctcgatcccccggaaatcgagcctggcgtgttgaaggtgctgcgtactgagaagcaatatcttggggtgtatatctggaatatgcgggggtcggacggcaccagtacctatgccacctttctagtaacctggaagggtgacgagaagacccggaaccccacccctgctgtgactccgcagcctaggggtgcggagttccacatgtggaattaccattcccatgtgttttccgtgggtgatacgttcagtctggctatgcacctccagtataagatacacgaagctccttttgatcttctactggaatggctgtatgtgccgattgaccctacgtgtcagcccatgagattgtattcgacgtgtttgtatcatccaaatgctccacagtgtttgagtcatatgaacagcggatgcactttcaccagtccccacctagcccagcgggtggcctcgacggtgtaccagaattgtgagcatgctgacaactatacggcatactgcctcggaattagccacatggagccaagcttcgggctgattctgcatgacggtggaactacacttaaattcgtggacactcctgagtcgcttagcgggttgtacgtgtttgtagtgtatttcaatggtcatgttgaggcagtggcttataccgttgtcagcactgttgatcattttgtgaacgccattgaggagcgggggttcccgcctacggctgggcaaccccccgctacgactaagcctaaggaaattaccccggtgaatccaggtacctcgcctcttatcaggtatgcagcctggaccggtggtctggctgcagtcgtgctactatgcctcgtgattttcttgatctgcactgctaaacgcatgcgtgtcaaggcttatagggtggataaatccccctataaccagtctatgtactatgctggccttcctgtggacgacttcgaggattcggagtcgaccgatacagaggaggagtttggcaatgcgatcggggggagtcacgggggtagtagctacactgtgtatatcgataagacgagg

SEQ ID NO: 81 - DNA, 1869 bp, synthetic construct
  source 1..1869: mol_type = other DNA
atggggactgttaataagcctgtggtcggagtgttgatggggtttgggatcatcaccgggacattgaggatcacgaatcctgttcgtgcctcggtgttgcggtacgatgatttccacatagatgaggataagttggataccaattccgtttatgagccctattaccactctgaccacgccgaatcatcttgggtgaaccggggtgagtcttcgcgcaaggcttatgatcataattctccatacatatggccaagaaatgattatgatggtttcctggagaatgcccatgagcatcatggcgtttataaccaaggcagggggattgattctggagagcgtcttatgcagcctacccagatgtccgcccaggaggacctgggtgatgacactgggatccatgtgattccaactcttaatggtgacgatcgccataagattgtgaacgtggatcagaggcagtatggggacgtttttaagggcgatctcaatcctaagccgcagggacagaggctgatcgaggtttctgtggaggagaaccatccctttaccttgcgggctccaatccaaaggatctatggagtgaggtacacagaaacttggtcatttctgccctcgcttacctgcactggtgacgctgcccctgctattcagcatatatgccttaagcatacaacttgttttcaggatgtggtggtggatgttgattgcgctgagaataccaaggaagatcagcttgccgaaatttcttacagatttcagggcaaaaaggaagctgatcaaccttggattgttgtcaatacatccacgctttttgacgagctggagctcgatcccccggaaatcgagcctggcgtgttgaaggtgctgcgtactgagaagcaatatcttggggtgtatatctggaatatgcgggggtcggacggcaccagtacctatgccactttcctcgtgacgtggaagggcgacgagaagactcggaatcccacgccggctgtgaccccacagccgcgtggggccgagtttcacatgtggaattatcattctcacgtgttctctgtgggcgacacgttcagtttggccatgcaccttcagtacaagatacacgaagccccttttgatcttctgctcgaatggctgtatgtgccaattgacccgacgtgtcagcccatgagattatactctacgtgtttatatcatccaaatgctccacagtgtttgagtcatatgaacagtgggtgtacgttcacaagtcctcatctagcgcagcgcgtggcttccactgtctatcagaactgtgagcacgcagacaactatacagcctactgtctggggattagccacatggagccaagctttgggctgattcttcacgacggtggcaccacacttaagttcgtggacactcccgagtctttaagtgggttgtatgtttttgtggtttatttcaatggacacgtggaagccgtggcttacactgtggtgagtactgtggatcacttcgtgaatgccatcgaggagcgggggtttcctcctacggcaggacagccccccgcgaccacaaagcccaaagagattacaccagtgaaccctggcacaagccccctgattaggtatgctgcctggacaggcgggcttgctgccgtggtgttgctgtgtctagtcatctttttgatctgcactgccaagcggatgcgggtcaaggcttatcgggttgacaagtctccgtataatcagtcgatgtattacgcaggccttcctgtggatgattttgaggactctgagtccacagacaccgaggaggagtttggtaatgctattggcggtagtcacggggggtcgtcatatacagtgtatatcgacaagactcgg

SEQ ID NO: 82 - DNA, 1869 bp, synthetic construct
  source 1..1869: mol_type = other DNA
atggggactgttaataagccagttgtgggagttctgatggggttcggtatcatcactgggactctcaggattaccaatcctgttcgcgcctctgttttacgctatgatgactttcatattgatgaggataagctcgacacaaactctgtgtacgagccttattatcatagcgatcatgcagagtcgtcatgggtaaataggggtgagagttcccgcaaggcttatgatcataacagtccttatatctggccaagaaatgattacgatggtttcttggagaatgcccatgagcatcatggtgtttacaaccagggcagggggattgattctggagagcgtcttatgcagcctacccagatgtccgcccaggaggacctgggtgatgacactgggatccatgtgattccaactcttaatggtgacgatcgccataagattgtgaacgtggatcagaggcagtatggggacgtttttaagggcgatctcaatcctaagccgcagggacagaggctgatcgaggtttctgtggaggagaaccatccctttaccttgcgggctccaatccaaaggatctatggagtgaggtacacagaaacttggtcatttctgccctcgcttacctgcactggtgacgctgcccctgctattcagcatatatgccttaagcatacaacttgttttcaggatgtggtggtggatgttgattgcgctgagaataccaaggaagatcagcttgccgaaatttcttacagatttcagggcaaaaaggaagctgatcaaccttggattgttgtcaatacatccacgctttttgacgagctggagctcgatcccccggaaatcgagcctggcgtgttgaaggtgctgcgtactgagaagcaatatcttggggtgtatatctggaatatgcgggggtcggacggcaccagtacctatgccactttcctcgtgacgtggaagggcgacgagaagactcggaatcccacgccggctgtgaccccacagccgcgtggggccgagtttcacatgtggaattatcattctcacgtgttctctgtgggcgacacgttcagtttggccatgcaccttcagtacaagatacacgaagccccttttgatcttctgctcgaatggctgtatgtgccaattgacccgacgtgtcagcccatgagattatactctacgtgtttatatcatccaaatgctccacagtgtttgagtcatatgaacagtgggtgtacgttcacaagtccccacctagcccagcgggtggcctcgacggtgtaccagaattgtgagcatgctgacaactatacggcatactgcctcggaattagccacatggagccaagcttcgggctgattctgcatgacggtggaactacacttaaattcgtggacactcctgagtcgcttagcgggttgtacgtgtttgtagtgtatttcaatggtcatgttgaggcagtggcttataccgttgtcagcactgttgatcattttgtgaacgccattgaggagcgggggttcccgcctacggctgggcaaccccccgctacgactaagcccaaagagattacaccagtgaaccctggcacaagccccctgattaggtatgctgcctggacaggcgggcttgctgccgtggtgttgctgtgtctagtcatctttttgatctgcactgccaagcggatgcgggtcaaggcttatcgggttgacaagtctccgtataatcagtcgatgtattacgcaggccttcctgtggatgattttgaggactctgagtccacagacaccgaggaggagtttggtaatgctattggcggtagtcacggggggtcgtcatatacagtgtatatcgacaagactcgg

SEQ ID NO: 83 - DNA, 1869 bp, synthetic construct
  source 1..1869: mol_type = other DNA
atggggactgttaataagccagttgtgggagttctgatggggttcggtatcatcactgggactctcaggattaccaatcctgttcgcgcctctgttttacgctatgatgactttcatattgatgaggataagctcgacacaaactctgtgtacgagccttattatcatagcgatcatgcagagtcgtcatgggtaaataggggtgagagttcccgcaaggcttatgatcataacagtccttatatctggccaagaaatgattacgatggtttcttggagaatgcccatgagcatcatggtgtttacaaccagggtcggggtatcgactctggcgagagattgatgcaaccgacccaaatgagtgcgcaggaggacctaggcgatgataccgggattcacgtgattcctactctgaatggcgacgacagacacaagattgtcaatgttgatcagcggcagtacggggatgtgttcaagggtgacctcaatccgaagcctcaggggcagaggctcattgaggtttcggttgaggagaatcatccttttacactccgtgctcctattcagaggatttacggggtccggtatacagagacctggtcttttctgccgtcacttacttgcactggtgacgctgcccctgctattcagcatatatgccttaagcatacaacttgttttcaggatgtggtggtggatgttgattgcgctgagaataccaaggaagatcagcttgccgaaatttcttacagatttcagggcaaaaaggaagctgatcaaccttggattgttgtcaatacatccacgctttttgacgagctggagctcgatcccccggaaatcgagcctggcgtgttgaaggtgctgcgtactgagaagcaatatcttggggtgtatatctggaatatgcgggggtcggacggcaccagtacctatgccacctttctagtaacctggaagggtgacgagaagacccggaaccccacccctgctgtgactccgcagcctaggggtgcggagttccacatgtggaattaccattcccatgtgttttccgtgggtgatacgttcagtctggctatgcacctccagtataagatacacgaagctccttttgatcttctactggaatggctgtatgtgccgattgaccctacgtgtcagcccatgagattgtattcgacgtgtttgtatcatccaaatgctccacagtgtttgagtcatatgaacagcggatgcactttcaccagtcctcatctagcgcagcgcgtggcttccactgtctatcagaactgtgagcacgcagacaactatacagcctactgtctggggattagccacatggagccaagctttgggctgattcttcacgacggtggcaccacacttaagttcgtggacactcccgagtctttaagtgggttgtatgtttttgtggtttatttcaatggacacgtggaagccgtggcttacactgtggtgagtactgtggatcacttcgtgaatgccatcgaggagcgggggtttcctcctacggcaggacagccccccgcgaccacaaagcccaaagagattacaccagtgaaccctggcacaagccccctgattaggtatgctgcctggacaggcgggcttgctgccgtggtgttgctgtgtctagtcatctttttgatctgcactgccaagcggatgcgggtcaaggcttatcgggttgacaagtctccgtataatcagtcgatgtattacgcaggccttcctgtggatgattttgaggactctgagtccacagacaccgaggaggagtttggtaatgctattggcggtagtcacggggggtcgtcatatacagtgtatatcgacaagactcgg

SEQ ID NO: 84 - DNA, 1869 bp, synthetic construct
  source 1..1869: mol_type = other DNA
atggggactgttaataagcctgtggtcggagtgttgatggggtttgggatcatcaccgggacattgaggatcacgaatcctgttcgtgcctcggtgttgcggtacgatgatttccacatagatgaggataagttggataccaattccgtttatgagccctattaccactctgaccacgccgaatcatcttgggtgaaccggggtgagtcttcgcgcaaggcttatgatcataattctccatacatatggccaagaaatgattatgatggtttcctggagaatgcccatgagcatcatggcgtttataaccaaggtcggggtatcgactctggcgagagattgatgcaaccgacccaaatgagtgcgcaggaggacctaggcgatgataccgggattcacgtgattcctactctgaatggcgacgacagacacaagattgtcaatgttgatcagcggcagtacggggatgtgttcaagggtgacctcaatccgaagcctcaggggcagaggctcattgaggtttcggttgaggagaatcatccttttacactccgtgctcctattcagaggatttacggggtccggtatacagagacctggtcttttctgccgtcacttacttgcactggtgacgctgcccctgctattcagcatatatgccttaagcatacaacttgttttcaggatgtggtggtggatgttgattgcgctgagaataccaaggaagatcagcttgccgaaatttcttacagatttcagggcaaaaaggaagctgatcaaccttggattgttgtcaatacatccacgctttttgacgagctggagctcgatcccccggaaatcgagcctggcgtgttgaaggtgctgcgtactgagaagcaatatcttggggtgtatatctggaatatgcgggggtcggacggcaccagtacctatgccactttcctcgtgacgtggaagggcgacgagaagactcggaatcccacgccggctgtgaccccacagccgcgtggggccgagtttcacatgtggaattatcattctcacgtgttctctgtgggcgacacgttcagtttggccatgcaccttcagtacaagatacacgaagccccttttgatcttctgctcgaatggctgtatgtgccaattgacccgacgtgtcagcccatgagattatactctacgtgtttatatcatccaaatgctccacagtgtttgagtcatatgaacagtgggtgtacgttcacaagtccccacctagcccagcgggtggcctcgacggtgtaccagaattgtgagcatgctgacaactatacggcatactgcctcggaattagccacatggagccaagcttcgggctgattctgcatgacggtggaactacacttaaattcgtggacactcctgagtcgcttagcgggttgtacgtgtttgtagtgtatttcaatggtcatgttgaggcagtggcttataccgttgtcagcactgttgatcattttgtgaacgccattgaggagcgggggttcccgcctacggctgggcaaccccccgctacgactaagcccaaagagattacaccagtgaaccctggcacaagccccctgattaggtatgctgcctggacaggcgggcttgctgccgtggtgttgctgtgtctagtcatctttttgatctgcactgccaagcggatgcgggtcaaggcttatcgggttgacaagtctccgtataatcagtcgatgtattacgcaggccttcctgtggatgattttgaggactctgagtccacagacaccgaggaggagtttggtaatgctattggcggtagtcacggggggtcgtcatatacagtgtatatcgacaagactcgg

SEQ ID NO: 85 - DNA, 1869 bp, synthetic construct
  source 1..1869: mol_type = other DNA
atggggactgttaataagccagttgtgggagttctgatggggttcggtatcatcactgggactctcaggattaccaatcctgttcgcgcctctgttttacgctatgatgactttcatattgatgaggataagctcgacacaaactctgtgtacgagccttattatcatagcgatcatgcagagtcgtcatgggtaaataggggtgagagttcccgcaaggcttatgatcataacagtccttatatctggccaagaaatgattacgatggtttcttggagaatgcccatgagcatcatggtgtttacaaccagggtcggggtatcgactctggcgagagattgatgcaaccgacccaaatgagtgcgcaggaggacctaggcgatgataccgggattcacgtgattcctactctgaatggcgacgacagacacaagattgtcaatgttgatcagcggcagtacggggatgtgttcaagggtgacctcaatccgaagcctcaggggcagaggctcattgaggtttcggttgaggagaatcatccttttacactccgtgctcctattcagaggatttacggggtccggtatacagagacctggtcttttctgccgtcacttacttgcactggtgacgctgcccctgctattcagcatatatgccttaagcatacaacttgttttcaggatgtggtggtggatgttgattgcgctgagaataccaaggaagatcagcttgccgaaatttcttacagatttcagggcaaaaaggaagctgatcaaccttggattgttgtcaatacatccacgctttttgacgagctggagctcgatcccccggaaatcgagcctggcgtgttgaaggtgctgcgtactgagaagcaatatcttggggtgtatatctggaatatgcgggggtcggacggcaccagtacctatgccactttcctcgtgacgtggaagggcgacgagaagactcggaatcccacgccggctgtgaccccacagccgcgtggggccgagtttcacatgtggaattatcattctcacgtgttctctgtgggcgacacgttcagtttggccatgcaccttcagtacaagatacacgaagccccttttgatcttctgctcgaatggctgtatgtgccaattgacccgacgtgtcagcccatgagattatactctacgtgtttatatcatccaaatgctccacagtgtttgagtcatatgaacagtgggtgtacgttcacaagtcctcatctagcgcagcgcgtggcttccactgtctatcagaactgtgagcacgcagacaactatacagcctactgtctggggattagccacatggagccaagctttgggctgattcttcacgacggtggcaccacacttaagttcgtggacactcccgagtctttaagtgggttgtatgtttttgtggtttatttcaatggacacgtggaagccgtggcttacactgtggtgagtactgtggatcacttcgtgaatgccatcgaggagcgggggtttcctcctacggcaggacagccccccgcgaccacaaagcctaaggaaattaccccggtgaatccaggtacctcgcctcttatcaggtatgcagcctggaccggtggtctggctgcagtcgtgctactatgcctcgtgattttcttgatctgcactgctaaacgcatgcgtgtcaaggcttatagggtggataaatccccctataaccagtctatgtactatgctggccttcctgtggacgacttcgaggattcggagtcgaccgatacagaggaggagtttggcaatgcgatcggggggagtcacgggggtagtagctacactgtgtatatcgataagacgagg

SEQ ID NO: 86 - DNA, 1869 bp, synthetic construct
  source 1..1869: mol_type = other DNA
atggggactgttaataagccagttgtgggagttctgatggggttcggtatcatcactgggactctcaggattaccaatcctgttcgcgcctctgttttacgctatgatgactttcatattgatgaggataagctcgacacaaactctgtgtacgagccttattatcatagcgatcatgcagagtcgtcatgggtaaataggggtgagagttcccgcaaggcttatgatcataacagtccttatatctggccaagaaatgattacgatggtttcttggagaatgcccatgagcatcatggtgtttacaaccagggtcggggtatcgactctggcgagagattgatgcaaccgacccaaatgagtgcgcaggaggacctaggcgatgataccgggattcacgtgattcctactctgaatggcgacgacagacacaagattgtcaatgttgatcagcggcagtacggggatgtgttcaagggtgacctcaatccgaagcctcaggggcagaggctcattgaggtttcggttgaggagaatcatccttttacactccgtgctcctattcagaggatttacggggtccggtatacagagacctggtcttttctgccgtcacttacttgcactggtgacgctgcccctgctattcagcatatatgccttaagcatacaacttgttttcaggatgtggtggtggatgttgattgcgctgagaataccaaggaagatcagcttgccgaaatttcttacagatttcagggcaaaaaggaagctgatcaaccttggattgttgtcaatacatccacgctttttgacgagctggagctcgatcccccggaaatcgagcctggcgtgttgaaggtgctgcgtactgagaagcaatatcttggggtgtatatctggaatatgcgggggtcggacggcaccagtacctatgccactttcctcgtgacgtggaagggcgacgagaagactcggaatcccacgccggctgtgaccccacagccgcgtggggccgagtttcacatgtggaattatcattctcacgtgttctctgtgggcgacacgttcagtttggccatgcaccttcagtacaagatacacgaagccccttttgatcttctgctcgaatggctgtatgtgccaattgacccgacgtgtcagcccatgagattatactctacgtgtttatatcatccaaatgctccacagtgtttgagtcatatgaacagtgggtgtacgttcacaagtccccacctagcccagcgggtggcctcgacggtgtaccagaattgtgagcatgctgacaactatacggcatactgcctcggaattagccacatggagccaagcttcgggctgattctgcatgacggtggaactacacttaaattcgtggacactcctgagtcgcttagcgggttgtacgtgtttgtagtgtatttcaatggtcatgttgaggcagtggcttataccgttgtcagcactgttgatcattttgtgaacgccattgaggagcgggggttcccgcctacggctgggcaaccccccgctacgactaagcccaaagagattacaccagtgaaccctggcacaagccccctgattaggtatgctgcctggacaggcgggcttgctgccgtggtgttgctgtgtctagtcatctttttgatctgcactgccaagcggatgcgggtcaaggcttatcgggttgacaagtctccgtataatcagtcgatgtattacgcaggccttcctgtggatgattttgaggactctgagtccacagacaccgaggaggagtttggtaatgctattggcggtagtcacggggggtcgtcatatacagtgtatatcgacaagactcgg

SEQ ID NO: 87 - DNA, 1869 bp, synthetic construct
  source 1..1869: mol_type = other DNA
atggggactgttaataagcctgtggtcggagtgttgatggggtttgggatcatcaccgggacattgaggatcacgaatcctgttcgtgcctcggtgttgcggtacgatgatttccacatagatgaggataagttggataccaattccgtttatgagccctattaccactctgaccacgccgaatcatcttgggtgaaccggggtgagtcttcgcgcaaggcttatgatcataattctccatacatatggccaagaaatgattatgatggtttcctggagaatgcccatgagcatcatggcgtttataaccaaggcagggggattgattctggagagcgtcttatgcagcctacccagatgtccgcccaggaggacctgggtgatgacactgggatccatgtgattccaactcttaatggtgacgatcgccataagattgtgaacgtggatcagaggcagtatggggacgtttttaagggcgatctcaatcctaagccgcagggacagaggctgatcgaggtttctgtggaggagaaccatccctttaccttgcgggctccaatccaaaggatctatggagtgaggtacacagaaacttggtcatttctgccctcgcttacctgcactggtgacgctgcccctgctattcagcatatatgccttaagcatacaacttgttttcaggatgtggtggtggatgttgattgcgctgagaataccaaggaagatcagcttgccgaaatttcttacagatttcagggcaaaaaggaagctgatcaaccttggattgttgtcaatacatccacgctttttgacgagctggagctcgatcccccggaaatcgagcctggcgtgttgaaggtgctgcgtactgagaagcaatatcttggggtgtatatctggaatatgcgggggtcggacggcaccagtacctatgccactttcctcgtgacgtggaagggcgacgagaagactcggaatcccacgccggctgtgaccccacagccgcgtggggccgagtttcacatgtggaattatcattctcacgtgttctctgtgggcgacacgttcagtttggccatgcaccttcagtacaagatacacgaagccccttttgatcttctgctcgaatggctgtatgtgccaattgacccgacgtgtcagcccatgagattatactctacgtgtttatatcatccaaatgctccacagtgtttgagtcatatgaacagtgggtgtacgttcacaagtcctcatctagcgcagcgcgtggcttccactgtctatcagaactgtgagcacgcagacaactatacagcctactgtctggggattagccacatggagccaagctttgggctgattcttcacgacggtggcaccacacttaagttcgtggacactcccgagtctttaagtgggttgtatgtttttgtggtttatttcaatggacacgtggaagccgtggcttacactgtggtgagtactgtggatcacttcgtgaatgccatcgaggagcgggggtttcctcctacggcaggacagccccccgcgaccacaaagcctaaggaaattaccccggtgaatccaggtacctcgcctcttatcaggtatgcagcctggaccggtggtctggctgcagtcgtgctactatgcctcgtgattttcttgatctgcactgctaaacgcatgcgtgtcaaggcttatagggtggataaatccccctataaccagtctatgtactatgctggccttcctgtggacgacttcgaggattcggagtcgaccgatacagaggaggagtttggcaatgcgatcggggggagtcacgggggtagtagctacactgtgtatatcgataagacgagg

SEQ ID NO: 88 - DNA, 1869 bp, synthetic construct
  source 1..1869: mol_type = other DNA
atggggactgttaataagccagttgtgggagttctgatggggttcggtatcatcactgggactctcaggattaccaatcctgttcgcgcctctgttttacgctatgatgactttcatattgatgaggataagctcgacacaaactctgtgtacgagccttattatcatagcgatcatgcagagtcgtcatgggtaaataggggtgagagttcccgcaaggcttatgatcataacagtccttatatctggccaagaaatgattacgatggtttcttggagaatgcccatgagcatcatggtgtttacaaccagggcagggggattgattctggagagcgtcttatgcagcctacccagatgtccgcccaggaggacctgggtgatgacactgggatccatgtgattccaactcttaatggtgacgatcgccataagattgtgaacgtggatcagaggcagtatggggacgtttttaagggcgatctcaatcctaagccgcagggacagaggctgatcgaggtttctgtggaggagaaccatccctttaccttgcgggctccaatccaaaggatctatggagtgaggtacacagaaacttggtcatttctgccctcgcttacctgcactggtgacgctgcccctgctattcagcatatatgccttaagcatacaacttgttttcaggatgtggtggtggatgttgattgcgctgagaataccaaggaagatcagcttgccgaaatttcttacagatttcagggcaaaaaggaagctgatcaaccttggattgttgtcaatacatccacgctttttgacgagctggagctcgatcccccggaaatcgagcctggcgtgttgaaggtgctgcgtactgagaagcaatatcttggggtgtatatctggaatatgcgggggtcggacggcaccagtacctatgccactttcctcgtgacgtggaagggcgacgagaagactcggaatcccacgccggctgtgaccccacagccgcgtggggccgagtttcacatgtggaattatcattctcacgtgttctctgtgggcgacacgttcagtttggccatgcaccttcagtacaagatacacgaagccccttttgatcttctgctcgaatggctgtatgtgccaattgacccgacgtgtcagcccatgagattatactctacgtgtttatatcatccaaatgctccacagtgtttgagtcatatgaacagtgggtgtacgttcacaagtccccacctagcccagcgggtggcctcgacggtgtaccagaattgtgagcatgctgacaactatacggcatactgcctcggaattagccacatggagccaagcttcgggctgattctgcatgacggtggaactacacttaaattcgtggacactcctgagtcgcttagcgggttgtacgtgtttgtagtgtatttcaatggtcatgttgaggcagtggcttataccgttgtcagcactgttgatcattttgtgaacgccattgaggagcgggggttcccgcctacggctgggcaaccccccgctacgactaagcctaaggaaattaccccggtgaatccaggtacctcgcctcttatcaggtatgcagcctggaccggtggtctggctgcagtcgtgctactatgcctcgtgattttcttgatctgcactgctaaacgcatgcgtgtcaaggcttatagggtggataaatccccctataaccagtctatgtactatgctggccttcctgtggacgacttcgaggattcggagtcgaccgatacagaggaggagtttggcaatgcgatcggggggagtcacgggggtagtagctacactgtgtatatcgataagacgagg

SEQ ID NO: 89 - DNA, 1869 bp, synthetic construct
  source 1..1869: mol_type = other DNA
atggggactgttaataagcctgtggtcggagtgttgatggggtttgggatcatcaccgggacattgaggatcacgaatcctgttcgtgcctcggtgttgcggtacgatgatttccacatagatgaggataagttggataccaattccgtttatgagccctattaccactctgaccacgccgaatcatcttgggtgaaccggggtgagtcttcgcgcaaggcttatgatcataattctccatacatatggccaagaaatgattatgatggtttcctggagaatgcccatgagcatcatggcgtttataaccaaggtcggggtatcgactctggcgagagattgatgcaaccgacccaaatgagtgcgcaggaggacctaggcgatgataccgggattcacgtgattcctactctgaatggcgacgacagacacaagattgtcaatgttgatcagcggcagtacggggatgtgttcaagggtgacctcaatccgaagcctcaggggcagaggctcattgaggtttcggttgaggagaatcatccttttacactccgtgctcctattcagaggatttacggggtccggtatacagagacctggtcttttctgccgtcacttacttgcactggagatgctgctcccgctattcaacatatctgtctcaagcacaccacgtgcttccaggatgtggttgtagacgtcgattgcgctgagaataccaaggaggatcagctggctgagatcagttaccgcttccaggggaagaaggaagctgatcagccttggattgttgtgaatacgtctacactgtttgacgagcttgaactggaccctccagaaatcgagccaggtgtgttgaaagtgttgaggactgagaaacagtaccttggagtgtatatctggaatatgagaggttccgacgggacctctacatatgccactttcctcgtgacgtggaagggcgacgagaagactcggaatcccacgccggctgtgaccccacagccgcgtggggccgagtttcacatgtggaattatcattctcacgtgttctctgtgggcgacacgttcagtttggccatgcaccttcagtacaagatacacgaagccccttttgatcttctgctcgaatggctgtatgtgccaattgacccgacgtgtcagcccatgagattatactctacgtgtttatatcatccaaatgctccacagtgtttgagtcatatgaacagtgggtgtacgttcacaagtcctcatctagcgcagcgcgtggcttccactgtctatcagaactgtgagcacgcagacaactatacagcctactgtctggggattagccacatggagccaagctttgggctgattcttcacgacggtggcaccacacttaagttcgtggacactcccgagtctttaagtgggttgtatgtttttgtggtttatttcaatggacacgtggaagccgtggcttacactgtggtgagtactgtggatcacttcgtgaatgccatcgaggagcgggggtttcctcctacggcaggacagccccccgcgaccacaaagcctaaggaaattaccccggtgaatccaggtacctcgcctcttatcaggtatgcagcctggaccggtggtctggctgcagtcgtgctactatgcctcgtgattttcttgatctgcactgctaaacgcatgcgtgtcaaggcttatagggtggataaatccccctataaccagtctatgtactatgctggccttcctgtggacgacttcgaggattcggagtcgaccgatacagaggaggagtttggcaatgcgatcggggggagtcacgggggtagtagctacactgtgtatatcgataagacgagg

SEQ ID NO: 90 - DNA, 1869 bp, synthetic construct
  source 1..1869: mol_type = other DNA
atggggactgttaataagcctgtggtcggagtgttgatggggtttgggatcatcaccgggacattgaggatcacgaatcctgttcgtgcctcggtgttgcggtacgatgatttccacatagatgaggataagttggataccaattccgtttatgagccctattaccactctgaccacgccgaatcatcttgggtgaaccggggtgagtcttcgcgcaaggcttatgatcataattctccatacatatggccaagaaatgattatgatggtttcctggagaatgcccatgagcatcatggcgtttataaccaaggtcggggtatcgactctggcgagagattgatgcaaccgacccaaatgagtgcgcaggaggacctaggcgatgataccgggattcacgtgattcctactctgaatggcgacgacagacacaagattgtcaatgttgatcagcggcagtacggggatgtgttcaagggtgacctcaatccgaagcctcaggggcagaggctcattgaggtttcggttgaggagaatcatccttttacactccgtgctcctattcagaggatttacggggtccggtatacagagacctggtcttttctgccgtcacttacttgcactggagatgctgctcccgctattcaacatatctgtctcaagcacaccacgtgcttccaggatgtggttgtagacgtcgattgcgctgagaataccaaggaggatcagctggctgagatcagttaccgcttccaggggaagaaggaagctgatcagccttggattgttgtgaatacgtctacactgtttgacgagcttgaactggaccctccagaaatcgagccaggtgtgttgaaagtgttgaggactgagaaacagtaccttggagtgtatatctggaatatgagaggttccgacgggacctctacatatgccactttcctcgtgacgtggaagggcgacgagaagactcggaatcccacgccggctgtgaccccacagccgcgtggggccgagtttcacatgtggaattatcattctcacgtgttctctgtgggcgacacgttcagtttggccatgcaccttcagtacaagatacacgaagccccttttgatcttctgctcgaatggctgtatgtgccaattgacccgacgtgtcagcccatgagattatactctacgtgtttatatcatccaaatgctccacagtgtttgagtcatatgaacagtgggtgtacgttcacaagtcctcatctagcgcagcgcgtggcttccactgtctatcagaactgtgagcacgcagacaactatacagcctactgtctggggattagccacatggagccaagctttgggctgattcttcacgacggtggcaccacacttaagttcgtggacactcccgagtctttaagtgggttgtatgtttttgtggtttatttcaatggacacgtggaagccgtggcttacactgtggtgagtactgtggatcacttcgtgaatgccatcgaggagcgggggtttcctcctacggcaggacagccccccgcgaccacaaagcccaaagagattacaccagtgaaccctggcacaagccccctgattaggtatgctgcctggacaggcgggcttgctgccgtggtgttgctgtgtctagtcatctttttgatctgcactgccaagcggatgcgggtcaaggcttatcgggttgacaagtctccgtataatcagtcgatgtattacgcaggccttcctgtggatgattttgaggactctgagtccacagacaccgaggaggagtttggtaatgctattggcggtagtcacggggggtcgtcatatacagtgtatatcgacaagactcgg

SEQ ID NO: 91 - DNA, 1869 bp, synthetic construct
  source 1..1869: mol_type = other DNA
atggggactgttaataagccagttgtgggagttctgatggggttcggtatcatcactgggactctcaggattaccaatcctgttcgcgcctctgttttacgctatgatgactttcatattgatgaggataagctcgacacaaactctgtgtacgagccttattatcatagcgatcatgcagagtcgtcatgggtaaataggggtgagagttcccgcaaggcttatgatcataacagtccttatatctggccaagaaatgattacgatggtttcttggagaatgcccatgagcatcatggtgtttacaaccagggcagggggattgattctggagagcgtcttatgcagcctacccagatgtccgcccaggaggacctgggtgatgacactgggatccatgtgattccaactcttaatggtgacgatcgccataagattgtgaacgtggatcagaggcagtatggggacgtttttaagggcgatctcaatcctaagccgcagggacagaggctgatcgaggtttctgtggaggagaaccatccctttaccttgcgggctccaatccaaaggatctatggagtgaggtacacagaaacttggtcatttctgccctcgcttacctgcactggagatgctgctcccgctattcaacatatctgtctcaagcacaccacgtgcttccaggatgtggttgtagacgtcgattgcgctgagaataccaaggaggatcagctggctgagatcagttaccgcttccaggggaagaaggaagctgatcagccttggattgttgtgaatacgtctacactgtttgacgagcttgaactggaccctccagaaatcgagccaggtgtgttgaaagtgttgaggactgagaaacagtaccttggagtgtatatctggaatatgagaggttccgacgggacctctacatatgccacctttctagtaacctggaagggtgacgagaagacccggaaccccacccctgctgtgactccgcagcctaggggtgcggagttccacatgtggaattaccattcccatgtgttttccgtgggtgatacgttcagtctggctatgcacctccagtataagatacacgaagctccttttgatcttctactggaatggctgtatgtgccgattgaccctacgtgtcagcccatgagattgtattcgacgtgtttgtatcatccaaatgctccacagtgtttgagtcatatgaacagcggatgcactttcaccagtcctcatctagcgcagcgcgtggcttccactgtctatcagaactgtgagcacgcagacaactatacagcctactgtctggggattagccacatggagccaagctttgggctgattcttcacgacggtggcaccacacttaagttcgtggacactcccgagtctttaagtgggttgtatgtttttgtggtttatttcaatggacacgtggaagccgtggcttacactgtggtgagtactgtggatcacttcgtgaatgccatcgaggagcgggggtttcctcctacggcaggacagccccccgcgaccacaaagcctaaggaaattaccccggtgaatccaggtacctcgcctcttatcaggtatgcagcctggaccggtggtctggctgcagtcgtgctactatgcctcgtgattttcttgatctgcactgctaaacgcatgcgtgtcaaggcttatagggtggataaatccccctataaccagtctatgtactatgctggccttcctgtggacgacttcgaggattcggagtcgaccgatacagaggaggagtttggcaatgcgatcggggggagtcacgggggtagtagctacactgtgtatatcgataagacgagg

SEQ ID NO: 92 - DNA, 1869 bp, synthetic construct
  source 1..1869: mol_type = other DNA
atggggactgttaataagcctgtggtcggagtgttgatggggtttgggatcatcaccgggacattgaggatcacgaatcctgttcgtgcctcggtgttgcggtacgatgatttccacatagatgaggataagttggataccaattccgtttatgagccctattaccactctgaccacgccgaatcatcttgggtgaaccggggtgagtcttcgcgcaaggcttatgatcataattctccatacatatggccaagaaatgattatgatggtttcctggagaatgcccatgagcatcatggcgtttataaccaaggtcggggtatcgactctggcgagagattgatgcaaccgacccaaatgagtgcgcaggaggacctaggcgatgataccgggattcacgtgattcctactctgaatggcgacgacagacacaagattgtcaatgttgatcagcggcagtacggggatgtgttcaagggtgacctcaatccgaagcctcaggggcagaggctcattgaggtttcggttgaggagaatcatccttttacactccgtgctcctattcagaggatttacggggtccggtatacagagacctggtcttttctgccgtcacttacttgcactggagatgctgctcccgctattcaacatatctgtctcaagcacaccacgtgcttccaggatgtggttgtagacgtcgattgcgctgagaataccaaggaggatcagctggctgagatcagttaccgcttccaggggaagaaggaagctgatcagccttggattgttgtgaatacgtctacactgtttgacgagcttgaactggaccctccagaaatcgagccaggtgtgttgaaagtgttgaggactgagaaacagtaccttggagtgtatatctggaatatgagaggttccgacgggacctctacatatgccacctttctagtaacctggaagggtgacgagaagacccggaaccccacccctgctgtgactccgcagcctaggggtgcggagttccacatgtggaattaccattcccatgtgttttccgtgggtgatacgttcagtctggctatgcacctccagtataagatacacgaagctccttttgatcttctactggaatggctgtatgtgccgattgaccctacgtgtcagcccatgagattgtattcgacgtgtttgtatcatccaaatgctccacagtgtttgagtcatatgaacagcggatgcactttcaccagtccccacctagcccagcgggtggcctcgacggtgtaccagaattgtgagcatgctgacaactatacggcatactgcctcggaattagccacatggagccaagcttcgggctgattctgcatgacggtggaactacacttaaattcgtggacactcctgagtcgcttagcgggttgtacgtgtttgtagtgtatttcaatggtcatgttgaggcagtggcttataccgttgtcagcactgttgatcattttgtgaacgccattgaggagcgggggttcccgcctacggctgggcaaccccccgctacgactaagcctaaggaaattaccccggtgaatccaggtacctcgcctcttatcaggtatgcagcctggaccggtggtctggctgcagtcgtgctactatgcctcgtgattttcttgatctgcactgctaaacgcatgcgtgtcaaggcttatagggtggataaatccccctataaccagtctatgtactatgctggccttcctgtggacgacttcgaggattcggagtcgaccgatacagaggaggagtttggcaatgcgatcggggggagtcacgggggtagtagctacactgtgtatatcgataagacgagg

SEQ ID NO: 93 - DNA, 1869 bp, synthetic construct
  source 1..1869: mol_type = other DNA
atggggactgttaataagccagttgtgggagttctgatggggttcggtatcatcactgggactctcaggattaccaatcctgttcgcgcctctgttttacgctatgatgactttcatattgatgaggataagctcgacacaaactctgtgtacgagccttattatcatagcgatcatgcagagtcgtcatgggtaaataggggtgagagttcccgcaaggcttatgatcataacagtccttatatctggccaagaaatgattacgatggtttcttggagaatgcccatgagcatcatggtgtttacaaccagggcagggggattgattctggagagcgtcttatgcagcctacccagatgtccgcccaggaggacctgggtgatgacactgggatccatgtgattccaactcttaatggtgacgatcgccataagattgtgaacgtggatcagaggcagtatggggacgtttttaagggcgatctcaatcctaagccgcagggacagaggctgatcgaggtttctgtggaggagaaccatccctttaccttgcgggctccaatccaaaggatctatggagtgaggtacacagaaacttggtcatttctgccctcgcttacctgcactggagatgctgctcccgctattcaacatatctgtctcaagcacaccacgtgcttccaggatgtggttgtagacgtcgattgcgctgagaataccaaggaggatcagctggctgagatcagttaccgcttccaggggaagaaggaagctgatcagccttggattgttgtgaatacgtctacactgtttgacgagcttgaactggaccctccagaaatcgagccaggtgtgttgaaagtgttgaggactgagaaacagtaccttggagtgtatatctggaatatgagaggttccgacgggacctctacatatgccacctttctagtaacctggaagggtgacgagaagacccggaaccccacccctgctgtgactccgcagcctaggggtgcggagttccacatgtggaattaccattcccatgtgttttccgtgggtgatacgttcagtctggctatgcacctccagtataagatacacgaagctccttttgatcttctactggaatggctgtatgtgccgattgaccctacgtgtcagcccatgagattgtattcgacgtgtttgtatcatccaaatgctccacagtgtttgagtcatatgaacagcggatgcactttcaccagtccccacctagcccagcgggtggcctcgacggtgtaccagaattgtgagcatgctgacaactatacggcatactgcctcggaattagccacatggagccaagcttcgggctgattctgcatgacggtggaactacacttaaattcgtggacactcctgagtcgcttagcgggttgtacgtgtttgtagtgtatttcaatggtcatgttgaggcagtggcttataccgttgtcagcactgttgatcattttgtgaacgccattgaggagcgggggttcccgcctacggctgggcaaccccccgctacgactaagcccaaagagattacaccagtgaaccctggcacaagccccctgattaggtatgctgcctggacaggcgggcttgctgccgtggtgttgctgtgtctagtcatctttttgatctgcactgccaagcggatgcgggtcaaggcttatcgggttgacaagtctccgtataatcagtcgatgtattacgcaggccttcctgtggatgattttgaggactctgagtccacagacaccgaggaggagtttggtaatgctattggcggtagtcacggggggtcgtcatatacagtgtatatcgacaagactcgg

SEQ ID NO: 94 - DNA, 1869 bp, synthetic construct
  source 1..1869: mol_type = other DNA
atggggactgttaataagcctgtggtcggagtgttgatggggtttgggatcatcaccgggacattgaggatcacgaatcctgttcgtgcctcggtgttgcggtacgatgatttccacatagatgaggataagttggataccaattccgtttatgagccctattaccactctgaccacgccgaatcatcttgggtgaaccggggtgagtcttcgcgcaaggcttatgatcataattctccatacatatggccaagaaatgattatgatggtttcctggagaatgcccatgagcatcatggcgtttataaccaaggtcggggtatcgactctggcgagagattgatgcaaccgacccaaatgagtgcgcaggaggacctaggcgatgataccgggattcacgtgattcctactctgaatggcgacgacagacacaagattgtcaatgttgatcagcggcagtacggggatgtgttcaagggtgacctcaatccgaagcctcaggggcagaggctcattgaggtttcggttgaggagaatcatccttttacactccgtgctcctattcagaggatttacggggtccggtatacagagacctggtcttttctgccgtcacttacttgcactggagatgctgctcccgctattcaacatatctgtctcaagcacaccacgtgcttccaggatgtggttgtagacgtcgattgcgctgagaataccaaggaggatcagctggctgagatcagttaccgcttccaggggaagaaggaagctgatcagccttggattgttgtgaatacgtctacactgtttgacgagcttgaactggaccctccagaaatcgagccaggtgtgttgaaagtgttgaggactgagaaacagtaccttggagtgtatatctggaatatgagaggttccgacgggacctctacatatgccacctttctagtaacctggaagggtgacgagaagacccggaaccccacccctgctgtgactccgcagcctaggggtgcggagttccacatgtggaattaccattcccatgtgttttccgtgggtgatacgttcagtctggctatgcacctccagtataagatacacgaagctccttttgatcttctactggaatggctgtatgtgccgattgaccctacgtgtcagcccatgagattgtattcgacgtgtttgtatcatccaaatgctccacagtgtttgagtcatatgaacagcggatgcactttcaccagtcctcatctagcgcagcgcgtggcttccactgtctatcagaactgtgagcacgcagacaactatacagcctactgtctggggattagccacatggagccaagctttgggctgattcttcacgacggtggcaccacacttaagttcgtggacactcccgagtctttaagtgggttgtatgtttttgtggtttatttcaatggacacgtggaagccgtggcttacactgtggtgagtactgtggatcacttcgtgaatgccatcgaggagcgggggtttcctcctacggcaggacagccccccgcgaccacaaagcctaaggaaattaccccggtgaatccaggtacctcgcctcttatcaggtatgcagcctggaccggtggtctggctgcagtcgtgctactatgcctcgtgattttcttgatctgcactgctaaacgcatgcgtgtcaaggcttatagggtggataaatccccctataaccagtctatgtactatgctggccttcctgtggacgacttcgaggattcggagtcgaccgatacagaggaggagtttggcaatgcgatcggggggagtcacgggggtagtagctacactgtgtatatcgataagacgagg

SEQ ID NO: 95 - DNA, 1869 bp, synthetic construct
  source 1..1869: mol_type = other DNA
atggggactgttaataagccagttgtgggagttctgatggggttcggtatcatcactgggactctcaggattaccaatcctgttcgcgcctctgttttacgctatgatgactttcatattgatgaggataagctcgacacaaactctgtgtacgagccttattatcatagcgatcatgcagagtcgtcatgggtaaataggggtgagagttcccgcaaggcttatgatcataacagtccttatatctggccaagaaatgattacgatggtttcttggagaatgcccatgagcatcatggtgtttacaaccagggtcggggtatcgactctggcgagagattgatgcaaccgacccaaatgagtgcgcaggaggacctaggcgatgataccgggattcacgtgattcctactctgaatggcgacgacagacacaagattgtcaatgttgatcagcggcagtacggggatgtgttcaagggtgacctcaatccgaagcctcaggggcagaggctcattgaggtttcggttgaggagaatcatccttttacactccgtgctcctattcagaggatttacggggtccggtatacagagacctggtcttttctgccgtcacttacttgcactggagatgctgctcccgctattcaacatatctgtctcaagcacaccacgtgcttccaggatgtggttgtagacgtcgattgcgctgagaataccaaggaggatcagctggctgagatcagttaccgcttccaggggaagaaggaagctgatcagccttggattgttgtgaatacgtctacactgtttgacgagcttgaactggaccctccagaaatcgagccaggtgtgttgaaagtgttgaggactgagaaacagtaccttggagtgtatatctggaatatgagaggttccgacgggacctctacatatgccacctttctagtaacctggaagggtgacgagaagacccggaaccccacccctgctgtgactccgcagcctaggggtgcggagttccacatgtggaattaccattcccatgtgttttccgtgggtgatacgttcagtctggctatgcacctccagtataagatacacgaagctccttttgatcttctactggaatggctgtatgtgccgattgaccctacgtgtcagcccatgagattgtattcgacgtgtttgtatcatccaaatgctccacagtgtttgagtcatatgaacagcggatgcactttcaccagtcctcatctagcgcagcgcgtggcttccactgtctatcagaactgtgagcacgcagacaactatacagcctactgtctggggattagccacatggagccaagctttgggctgattcttcacgacggtggcaccacacttaagttcgtggacactcccgagtctttaagtgggttgtatgtttttgtggtttatttcaatggacacgtggaagccgtggcttacactgtggtgagtactgtggatcacttcgtgaatgccatcgaggagcgggggtttcctcctacggcaggacagccccccgcgaccacaaagcctaaggaaattaccccggtgaatccaggtacctcgcctcttatcaggtatgcagcctggaccggtggtctggctgcagtcgtgctactatgcctcgtgattttcttgatctgcactgctaaacgcatgcgtgtcaaggcttatagggtggataaatccccctataaccagtctatgtactatgctggccttcctgtggacgacttcgaggattcggagtcgaccgatacagaggaggagtttggcaatgcgatcggggggagtcacgggggtagtagctacactgtgtatatcgataagacgagg

SEQ ID NO: 96 - DNA, 1869 bp, synthetic construct
  source 1..1869: mol_type = other DNA
atggggactgttaataagccagttgtgggagttctgatggggttcggtatcatcactgggactctcaggattaccaatcctgttcgcgcctctgttttacgctatgatgactttcatattgatgaggataagctcgacacaaactctgtgtacgagccttattatcatagcgatcatgcagagtcgtcatgggtaaataggggtgagagttcccgcaaggcttatgatcataacagtccttatatctggccaagaaatgattacgatggtttcttggagaatgcccatgagcatcatggtgtttacaaccagggtcggggtatcgactctggcgagagattgatgcaaccgacccaaatgagtgcgcaggaggacctaggcgatgataccgggattcacgtgattcctactctgaatggcgacgacagacacaagattgtcaatgttgatcagcggcagtacggggatgtgttcaagggtgacctcaatccgaagcctcaggggcagaggctcattgaggtttcggttgaggagaatcatccttttacactccgtgctcctattcagaggatttacggggtccggtatacagagacctggtcttttctgccgtcacttacttgcactggagatgctgctcccgctattcaacatatctgtctcaagcacaccacgtgcttccaggatgtggttgtagacgtcgattgcgctgagaataccaaggaggatcagctggctgagatcagttaccgcttccaggggaagaaggaagctgatcagccttggattgttgtgaatacgtctacactgtttgacgagcttgaactggaccctccagaaatcgagccaggtgtgttgaaagtgttgaggactgagaaacagtaccttggagtgtatatctggaatatgagaggttccgacgggacctctacatatgccactttcctcgtgacgtggaagggcgacgagaagactcggaatcccacgccggctgtgaccccacagccgcgtggggccgagtttcacatgtggaattatcattctcacgtgttctctgtgggcgacacgttcagtttggccatgcaccttcagtacaagatacacgaagccccttttgatcttctgctcgaatggctgtatgtgccaattgacccgacgtgtcagcccatgagattatactctacgtgtttatatcatccaaatgctccacagtgtttgagtcatatgaacagtgggtgtacgttcacaagtccccacctagcccagcgggtggcctcgacggtgtaccagaattgtgagcatgctgacaactatacggcatactgcctcggaattagccacatggagccaagcttcgggctgattctgcatgacggtggaactacacttaaattcgtggacactcctgagtcgcttagcgggttgtacgtgtttgtagtgtatttcaatggtcatgttgaggcagtggcttataccgttgtcagcactgttgatcattttgtgaacgccattgaggagcgggggttcccgcctacggctgggcaaccccccgctacgactaagcccaaagagattacaccagtgaaccctggcacaagccccctgattaggtatgctgcctggacaggcgggcttgctgccgtggtgttgctgtgtctagtcatctttttgatctgcactgccaagcggatgcgggtcaaggcttatcgggttgacaagtctccgtataatcagtcgatgtattacgcaggccttcctgtggatgattttgaggactctgagtccacagacaccgaggaggagtttggtaatgctattggcggtagtcacggggggtcgtcatatacagtgtatatcgacaagactcgg

SEQ ID NO: 97 - DNA, 1869 bp, synthetic construct
  source 1..1869: mol_type = other DNA
atggggactgttaataagccagttgtgggagttctgatggggttcggtatcatcactgggactctcaggattaccaatcctgttcgcgcctctgttttacgctatgatgactttcatattgatgaggataagctcgacacaaactctgtgtacgagccttattatcatagcgatcatgcagagtcgtcatgggtaaataggggtgagagttcccgcaaggcttatgatcataacagtccttatatctggccaagaaatgattacgatggtttcttggagaatgcccatgagcatcatggtgtttacaaccagggcagggggattgattctggagagcgtcttatgcagcctacccagatgtccgcccaggaggacctgggtgatgacactgggatccatgtgattccaactcttaatggtgacgatcgccataagattgtgaacgtggatcagaggcagtatggggacgtttttaagggcgatctcaatcctaagccgcagggacagaggctgatcgaggtttctgtggaggagaaccatccctttaccttgcgggctccaatccaaaggatctatggagtgaggtacacagaaacttggtcatttctgccctcgcttacctgcactggtgacgctgcccctgctattcagcatatatgccttaagcatacaacttgttttcaggatgtggtggtggatgttgattgcgctgagaataccaaggaagatcagcttgccgaaatttcttacagatttcagggcaaaaaggaagctgatcaaccttggattgttgtcaatacatccacgctttttgacgagctggagctcgatcccccggaaatcgagcctggcgtgttgaaggtgctgcgtactgagaagcaatatcttggggtgtatatctggaatatgcgggggtcggacggcaccagtacctatgccactttcctcgtgacgtggaagggcgacgagaagactcggaatcccacgccggctgtgaccccacagccgcgtggggccgagtttcacatgtggaattatcattctcacgtgttctctgtgggcgacacgttcagtttggccatgcaccttcagtacaagatacacgaagccccttttgatcttctgctcgaatggctgtatgtgccaattgacccgacgtgtcagcccatgagattatactctacgtgtttatatcatccaaatgctccacagtgtttgagtcatatgaacagtgggtgtacgttcacaagtcctcatctagcgcagcgcgtggcttccactgtctatcagaactgtgagcacgcagacaactatacagcctactgtctggggattagccacatggagccaagctttgggctgattcttcacgacggtggcaccacacttaagttcgtggacactcccgagtctttaagtgggttgtatgtttttgtggtttatttcaatggacacgtggaagccgtggcttacactgtggtgagtactgtggatcacttcgtgaatgccatcgaggagcgggggtttcctcctacggcaggacagccccccgcgaccacaaagcccaaagagattacaccagtgaaccctggcacaagccccctgattaggtatgctgcctggacaggcgggcttgctgccgtggtgttgctgtgtctagtcatctttttgatctgcactgccaagcggatgcgggtcaaggcttatcgggttgacaagtctccgtataatcagtcgatgtattacgcaggccttcctgtggatgattttgaggactctgagtccacagacaccgaggaggagtttggtaatgctattggcggtagtcacggggggtcgtcatatacagtgtatatcgacaagactcgg

SEQ ID NO: 98 - DNA, 1869 bp, synthetic construct
  source 1..1869: mol_type = other DNA
atggggactgttaataagccagttgtgggagttctgatggggttcggtatcatcactgggactctcaggattaccaatcctgttcgcgcctctgttttacgctatgatgactttcatattgatgaggataagctcgacacaaactctgtgtacgagccttattatcatagcgatcatgcagagtcgtcatgggtaaataggggtgagagttcccgcaaggcttatgatcataacagtccttatatctggccaagaaatgattacgatggtttcttggagaatgcccatgagcatcatggtgtttacaaccagggtcggggtatcgactctggcgagagattgatgcaaccgacccaaatgagtgcgcaggaggacctaggcgatgataccgggattcacgtgattcctactctgaatggcgacgacagacacaagattgtcaatgttgatcagcggcagtacggggatgtgttcaagggtgacctcaatccgaagcctcaggggcagaggctcattgaggtttcggttgaggagaatcatccttttacactccgtgctcctattcagaggatttacggggtccggtatacagagacctggtcttttctgccgtcacttacttgcactggtgacgctgcccctgctattcagcatatatgccttaagcatacaacttgttttcaggatgtggtggtggatgttgattgcgctgagaataccaaggaagatcagcttgccgaaatttcttacagatttcagggcaaaaaggaagctgatcaaccttggattgttgtcaatacatccacgctttttgacgagctggagctcgatcccccggaaatcgagcctggcgtgttgaaggtgctgcgtactgagaagcaatatcttggggtgtatatctggaatatgcgggggtcggacggcaccagtacctatgccactttcctcgtgacgtggaagggcgacgagaagactcggaatcccacgccggctgtgaccccacagccgcgtggggccgagtttcacatgtggaattatcattctcacgtgttctctgtgggcgacacgttcagtttggccatgcaccttcagtacaagatacacgaagccccttttgatcttctgctcgaatggctgtatgtgccaattgacccgacgtgtcagcccatgagattatactctacgtgtttatatcatccaaatgctccacagtgtttgagtcatatgaacagtgggtgtacgttcacaagtcctcatctagcgcagcgcgtggcttccactgtctatcagaactgtgagcacgcagacaactatacagcctactgtctggggattagccacatggagccaagctttgggctgattcttcacgacggtggcaccacacttaagttcgtggacactcccgagtctttaagtgggttgtatgtttttgtggtttatttcaatggacacgtggaagccgtggcttacactgtggtgagtactgtggatcacttcgtgaatgccatcgaggagcgggggtttcctcctacggcaggacagccccccgcgaccacaaagcccaaagagattacaccagtgaaccctggcacaagccccctgattaggtatgctgcctggacaggcgggcttgctgccgtggtgttgctgtgtctagtcatctttttgatctgcactgccaagcggatgcgggtcaaggcttatcgggttgacaagtctccgtataatcagtcgatgtattacgcaggccttcctgtggatgattttgaggactctgagtccacagacaccgaggaggagtttggtaatgctattggcggtagtcacggggggtcgtcatatacagtgtatatcgacaagactcgg

SEQ ID NO: 99 - DNA, 1869 bp, synthetic construct
  source 1..1869: mol_type = other DNA
atggggactgttaataagcctgtggtcggagtgttgatggggtttgggatcatcaccgggacattgaggatcacgaatcctgttcgtgcctcggtgttgcggtacgatgatttccacatagatgaggataagttggataccaattccgtttatgagccctattaccactctgaccacgccgaatcatcttgggtgaaccggggtgagtcttcgcgcaaggcttatgatcataattctccatacatatggccaagaaatgattatgatggtttcctggagaatgcccatgagcatcatggcgtttataaccaaggcagggggattgattctggagagcgtcttatgcagcctacccagatgtccgcccaggaggacctgggtgatgacactgggatccatgtgattccaactcttaatggtgacgatcgccataagattgtgaacgtggatcagaggcagtatggggacgtttttaagggcgatctcaatcctaagccgcagggacagaggctgatcgaggtttctgtggaggagaaccatccctttaccttgcgggctccaatccaaaggatctatggagtgaggtacacagaaacttggtcatttctgccctcgcttacctgcactggtgacgctgcccctgctattcagcatatatgccttaagcatacaacttgttttcaggatgtggtggtggatgttgattgcgctgagaataccaaggaagatcagcttgccgaaatttcttacagatttcagggcaaaaaggaagctgatcaaccttggattgttgtcaatacatccacgctttttgacgagctggagctcgatcccccggaaatcgagcctggcgtgttgaaggtgctgcgtactgagaagcaatatcttggggtgtatatctggaatatgcgggggtcggacggcaccagtacctatgccacctttctagtaacctggaagggtgacgagaagacccggaaccccacccctgctgtgactccgcagcctaggggtgcggagttccacatgtggaattaccattcccatgtgttttccgtgggtgatacgttcagtctggctatgcacctccagtataagatacacgaagctccttttgatcttctactggaatggctgtatgtgccgattgaccctacgtgtcagcccatgagattgtattcgacgtgtttgtatcatccaaatgctccacagtgtttgagtcatatgaacagcggatgcactttcaccagtcctcatctagcgcagcgcgtggcttccactgtctatcagaactgtgagcacgcagacaactatacagcctactgtctggggattagccacatggagccaagctttgggctgattcttcacgacggtggcaccacacttaagttcgtggacactcccgagtctttaagtgggttgtatgtttttgtggtttatttcaatggacacgtggaagccgtggcttacactgtggtgagtactgtggatcacttcgtgaatgccatcgaggagcgggggtttcctcctacggcaggacagccccccgcgaccacaaagcccaaagagattacaccagtgaaccctggcacaagccccctgattaggtatgctgcctggacaggcgggcttgctgccgtggtgttgctgtgtctagtcatctttttgatctgcactgccaagcggatgcgggtcaaggcttatcgggttgacaagtctccgtataatcagtcgatgtattacgcaggccttcctgtggatgattttgaggactctgagtccacagacaccgaggaggagtttggtaatgctattggcggtagtcacggggggtcgtcatatacagtgtatatcgacaagactcgg

SEQ ID NO: 100 - DNA, 1869 bp, synthetic construct
  source 1..1869: mol_type = other DNA
atggggactgttaataagcctgtggtcggagtgttgatggggtttgggatcatcaccgggacattgaggatcacgaatcctgttcgtgcctcggtgttgcggtacgatgatttccacatagatgaggataagttggataccaattccgtttatgagccctattaccactctgaccacgccgaatcatcttgggtgaaccggggtgagtcttcgcgcaaggcttatgatcataattctccatacatatggccaagaaatgattatgatggtttcctggagaatgcccatgagcatcatggcgtttataaccaaggcagggggattgattctggagagcgtcttatgcagcctacccagatgtccgcccaggaggacctgggtgatgacactgggatccatgtgattccaactcttaatggtgacgatcgccataagattgtgaacgtggatcagaggcagtatggggacgtttttaagggcgatctcaatcctaagccgcagggacagaggctgatcgaggtttctgtggaggagaaccatccctttaccttgcgggctccaatccaaaggatctatggagtgaggtacacagaaacttggtcatttctgccctcgcttacctgcactggagatgctgctcccgctattcaacatatctgtctcaagcacaccacgtgcttccaggatgtggttgtagacgtcgattgcgctgagaataccaaggaggatcagctggctgagatcagttaccgcttccaggggaagaaggaagctgatcagccttggattgttgtgaatacgtctacactgtttgacgagcttgaactggaccctccagaaatcgagccaggtgtgttgaaagtgttgaggactgagaaacagtaccttggagtgtatatctggaatatgagaggttccgacgggacctctacatatgccactttcctcgtgacgtggaagggcgacgagaagactcggaatcccacgccggctgtgaccccacagccgcgtggggccgagtttcacatgtggaattatcattctcacgtgttctctgtgggcgacacgttcagtttggccatgcaccttcagtacaagatacacgaagccccttttgatcttctgctcgaatggctgtatgtgccaattgacccgacgtgtcagcccatgagattatactctacgtgtttatatcatccaaatgctccacagtgtttgagtcatatgaacagtgggtgtacgttcacaagtcctcatctagcgcagcgcgtggcttccactgtctatcagaactgtgagcacgcagacaactatacagcctactgtctggggattagccacatggagccaagctttgggctgattcttcacgacggtggcaccacacttaagttcgtggacactcccgagtctttaagtgggttgtatgtttttgtggtttatttcaatggacacgtggaagccgtggcttacactgtggtgagtactgtggatcacttcgtgaatgccatcgaggagcgggggtttcctcctacggcaggacagccccccgcgaccacaaagcccaaagagattacaccagtgaaccctggcacaagccccctgattaggtatgctgcctggacaggcgggcttgctgccgtggtgttgctgtgtctagtcatctttttgatctgcactgccaagcggatgcgggtcaaggcttatcgggttgacaagtctccgtataatcagtcgatgtattacgcaggccttcctgtggatgattttgaggactctgagtccacagacaccgaggaggagtttggtaatgctattggcggtagtcacggggggtcgtcatatacagtgtatatcgacaagactcgg

SEQ ID NO: 101 - DNA, 1869 bp, synthetic construct
  source 1..1869: mol_type = other DNA
atggggactgttaataagccagttgtgggagttctgatggggttcggtatcatcactgggactctcaggattaccaatcctgttcgcgcctctgttttacgctatgatgactttcatattgatgaggataagctcgacacaaactctgtgtacgagccttattatcatagcgatcatgcagagtcgtcatgggtaaataggggtgagagttcccgcaaggcttatgatcataacagtccttatatctggccaagaaatgattacgatggtttcttggagaatgcccatgagcatcatggtgtttacaaccagggtcggggtatcgactctggcgagagattgatgcaaccgacccaaatgagtgcgcaggaggacctaggcgatgataccgggattcacgtgattcctactctgaatggcgacgacagacacaagattgtcaatgttgatcagcggcagtacggggatgtgttcaagggtgacctcaatccgaagcctcaggggcagaggctcattgaggtttcggttgaggagaatcatccttttacactccgtgctcctattcagaggatttacggggtccggtatacagagacctggtcttttctgccgtcacttacttgcactggtgacgctgcccctgctattcagcatatatgccttaagcatacaacttgttttcaggatgtggtggtggatgttgattgcgctgagaataccaaggaagatcagcttgccgaaatttcttacagatttcagggcaaaaaggaagctgatcaaccttggattgttgtcaatacatccacgctttttgacgagctggagctcgatcccccggaaatcgagcctggcgtgttgaaggtgctgcgtactgagaagcaatatcttggggtgtatatctggaatatgcgggggtcggacggcaccagtacctatgccacctttctagtaacctggaagggtgacgagaagacccggaaccccacccctgctgtgactccgcagcctaggggtgcggagttccacatgtggaattaccattcccatgtgttttccgtgggtgatacgttcagtctggctatgcacctccagtataagatacacgaagctccttttgatcttctactggaatggctgtatgtgccgattgaccctacgtgtcagcccatgagattgtattcgacgtgtttgtatcatccaaatgctccacagtgtttgagtcatatgaacagcggatgcactttcaccagtccccacctagcccagcgggtggcctcgacggtgtaccagaattgtgagcatgctgacaactatacggcatactgcctcggaattagccacatggagccaagcttcgggctgattctgcatgacggtggaactacacttaaattcgtggacactcctgagtcgcttagcgggttgtacgtgtttgtagtgtatttcaatggtcatgttgaggcagtggcttataccgttgtcagcactgttgatcattttgtgaacgccattgaggagcgggggttcccgcctacggctgggcaaccccccgctacgactaagcctaaggaaattaccccggtgaatccaggtacctcgcctcttatcaggtatgcagcctggaccggtggtctggctgcagtcgtgctactatgcctcgtgattttcttgatctgcactgctaaacgcatgcgtgtcaaggcttatagggtggataaatccccctataaccagtctatgtactatgctggccttcctgtggacgacttcgaggattcggagtcgaccgatacagaggaggagtttggcaatgcgatcggggggagtcacgggggtagtagctacactgtgtatatcgataagacgagg

SEQ ID NO: 102 - DNA, 1869 bp, synthetic construct
  source 1..1869: mol_type = other DNA
atggggactgttaataagcctgtggtcggagtgttgatggggtttgggatcatcaccgggacattgaggatcacgaatcctgttcgtgcctcggtgttgcggtacgatgatttccacatagatgaggataagttggataccaattccgtttatgagccctattaccactctgaccacgccgaatcatcttgggtgaaccggggtgagtcttcgcgcaaggcttatgatcataattctccatacatatggccaagaaatgattatgatggtttcctggagaatgcccatgagcatcatggcgtttataaccaaggtcggggtatcgactctggcgagagattgatgcaaccgacccaaatgagtgcgcaggaggacctaggcgatgataccgggattcacgtgattcctactctgaatggcgacgacagacacaagattgtcaatgttgatcagcggcagtacggggatgtgttcaagggtgacctcaatccgaagcctcaggggcagaggctcattgaggtttcggttgaggagaatcatccttttacactccgtgctcctattcagaggatttacggggtccggtatacagagacctggtcttttctgccgtcacttacttgcactggtgacgctgcccctgctattcagcatatatgccttaagcatacaacttgttttcaggatgtggtggtggatgttgattgcgctgagaataccaaggaagatcagcttgccgaaatttcttacagatttcagggcaaaaaggaagctgatcaaccttggattgttgtcaatacatccacgctttttgacgagctggagctcgatcccccggaaatcgagcctggcgtgttgaaggtgctgcgtactgagaagcaatatcttggggtgtatatctggaatatgcgggggtcggacggcaccagtacctatgccacctttctagtaacctggaagggtgacgagaagacccggaaccccacccctgctgtgactccgcagcctaggggtgcggagttccacatgtggaattaccattcccatgtgttttccgtgggtgatacgttcagtctggctatgcacctccagtataagatacacgaagctccttttgatcttctactggaatggctgtatgtgccgattgaccctacgtgtcagcccatgagattgtattcgacgtgtttgtatcatccaaatgctccacagtgtttgagtcatatgaacagcggatgcactttcaccagtcctcatctagcgcagcgcgtggcttccactgtctatcagaactgtgagcacgcagacaactatacagcctactgtctggggattagccacatggagccaagctttgggctgattcttcacgacggtggcaccacacttaagttcgtggacactcccgagtctttaagtgggttgtatgtttttgtggtttatttcaatggacacgtggaagccgtggcttacactgtggtgagtactgtggatcacttcgtgaatgccatcgaggagcgggggtttcctcctacggcaggacagccccccgcgaccacaaagcctaaggaaattaccccggtgaatccaggtacctcgcctcttatcaggtatgcagcctggaccggtggtctggctgcagtcgtgctactatgcctcgtgattttcttgatctgcactgctaaacgcatgcgtgtcaaggcttatagggtggataaatccccctataaccagtctatgtactatgctggccttcctgtggacgacttcgaggattcggagtcgaccgatacagaggaggagtttggcaatgcgatcggggggagtcacgggggtagtagctacactgtgtatatcgataagacgagg

SEQ ID NO: 103 - DNA, 1869 bp, synthetic construct
  source 1..1869: mol_type = other DNA
atggggactgttaataagcctgtggtcggagtgttgatggggtttgggatcatcaccgggacattgaggatcacgaatcctgttcgtgcctcggtgttgcggtacgatgatttccacatagatgaggataagttggataccaattccgtttatgagccctattaccactctgaccacgccgaatcatcttgggtgaaccggggtgagtcttcgcgcaaggcttatgatcataattctccatacatatggccaagaaatgattatgatggtttcctggagaatgcccatgagcatcatggcgtttataaccaaggtcggggtatcgactctggcgagagattgatgcaaccgacccaaatgagtgcgcaggaggacctaggcgatgataccgggattcacgtgattcctactctgaatggcgacgacagacacaagattgtcaatgttgatcagcggcagtacggggatgtgttcaagggtgacctcaatccgaagcctcaggggcagaggctcattgaggtttcggttgaggagaatcatccttttacactccgtgctcctattcagaggatttacggggtccggtatacagagacctggtcttttctgccgtcacttacttgcactggagatgctgctcccgctattcaacatatctgtctcaagcacaccacgtgcttccaggatgtggttgtagacgtcgattgcgctgagaataccaaggaggatcagctggctgagatcagttaccgcttccaggggaagaaggaagctgatcagccttggattgttgtgaatacgtctacactgtttgacgagcttgaactggaccctccagaaatcgagccaggtgtgttgaaagtgttgaggactgagaaacagtaccttggagtgtatatctggaatatgagaggttccgacgggacctctacatatgccacctttctagtaacctggaagggtgacgagaagacccggaaccccacccctgctgtgactccgcagcctaggggtgcggagttccacatgtggaattaccattcccatgtgttttccgtgggtgatacgttcagtctggctatgcacctccagtataagatacacgaagctccttttgatcttctactggaatggctgtatgtgccgattgaccctacgtgtcagcccatgagattgtattcgacgtgtttgtatcatccaaatgctccacagtgtttgagtcatatgaacagcggatgcactttcaccagtcctcatctagcgcagcgcgtggcttccactgtctatcagaactgtgagcacgcagacaactatacagcctactgtctggggattagccacatggagccaagctttgggctgattcttcacgacggtggcaccacacttaagttcgtggacactcccgagtctttaagtgggttgtatgtttttgtggtttatttcaatggacacgtggaagccgtggcttacactgtggtgagtactgtggatcacttcgtgaatgccatcgaggagcgggggtttcctcctacggcaggacagccccccgcgaccacaaagcccaaagagattacaccagtgaaccctggcacaagccccctgattaggtatgctgcctggacaggcgggcttgctgccgtggtgttgctgtgtctagtcatctttttgatctgcactgccaagcggatgcgggtcaaggcttatcgggttgacaagtctccgtataatcagtcgatgtattacgcaggccttcctgtggatgattttgaggactctgagtccacagacaccgaggaggagtttggtaatgctattggcggtagtcacggggggtcgtcatatacagtgtatatcgacaagactcgg

SEQ ID NO: 104 - DNA, 1869 bp, synthetic construct
  source 1..1869: mol_type = other DNA
atggggactgttaataagccagttgtgggagttctgatggggttcggtatcatcactgggactctcaggattaccaatcctgttcgcgcctctgttttacgctatgatgactttcatattgatgaggataagctcgacacaaactctgtgtacgagccttattatcatagcgatcatgcagagtcgtcatgggtaaataggggtgagagttcccgcaaggcttatgatcataacagtccttatatctggccaagaaatgattacgatggtttcttggagaatgcccatgagcatcatggtgtttacaaccagggtcggggtatcgactctggcgagagattgatgcaaccgacccaaatgagtgcgcaggaggacctaggcgatgataccgggattcacgtgattcctactctgaatggcgacgacagacacaagattgtcaatgttgatcagcggcagtacggggatgtgttcaagggtgacctcaatccgaagcctcaggggcagaggctcattgaggtttcggttgaggagaatcatccttttacactccgtgctcctattcagaggatttacggggtccggtatacagagacctggtcttttctgccgtcacttacttgcactggagatgctgctcccgctattcaacatatctgtctcaagcacaccacgtgcttccaggatgtggttgtagacgtcgattgcgctgagaataccaaggaggatcagctggctgagatcagttaccgcttccaggggaagaaggaagctgatcagccttggattgttgtgaatacgtctacactgtttgacgagcttgaactggaccctccagaaatcgagccaggtgtgttgaaagtgttgaggactgagaaacagtaccttggagtgtatatctggaatatgagaggttccgacgggacctctacatatgccactttcctcgtgacgtggaagggcgacgagaagactcggaatcccacgccggctgtgaccccacagccgcgtggggccgagtttcacatgtggaattatcattctcacgtgttctctgtgggcgacacgttcagtttggccatgcaccttcagtacaagatacacgaagccccttttgatcttctgctcgaatggctgtatgtgccaattgacccgacgtgtcagcccatgagattatactctacgtgtttatatcatccaaatgctccacagtgtttgagtcatatgaacagtgggtgtacgttcacaagtcctcatctagcgcagcgcgtggcttccactgtctatcagaactgtgagcacgcagacaactatacagcctactgtctggggattagccacatggagccaagctttgggctgattcttcacgacggtggcaccacacttaagttcgtggacactcccgagtctttaagtgggttgtatgtttttgtggtttatttcaatggacacgtggaagccgtggcttacactgtggtgagtactgtggatcacttcgtgaatgccatcgaggagcgggggtttcctcctacggcaggacagccccccgcgaccacaaagcccaaagagattacaccagtgaaccctggcacaagccccctgattaggtatgctgcctggacaggcgggcttgctgccgtggtgttgctgtgtctagtcatctttttgatctgcactgccaagcggatgcgggtcaaggcttatcgggttgacaagtctccgtataatcagtcgatgtattacgcaggccttcctgtggatgattttgaggactctgagtccacagacaccgaggaggagtttggtaatgctattggcggtagtcacggggggtcgtcatatacagtgtatatcgacaagactcgg

SEQ ID NO: 105 - DNA, 1869 bp, synthetic construct; identical to SEQ ID NO: 36
  source 1..1869: mol_type = other DNA

SEQ ID NO: 106 - DNA, 1869 bp, synthetic construct
  source 1..1869: mol_type = other DNA
atgggcactgtcaacaagcccgtagtgggggtcctgatggggttcgggatcatcacggggactctgcggatcactaatccggttagggcctctgtgctgcgctatgacgacttccacattgatgaggataagctggacacaaatagcgtatatgagccatattaccatagcgatcatgctgagtcttcctgggtgaataggggtgagtcttcccgcaaggcttatgatcacaatagtccatacatctggccccggaatgactatgatggctttcttgagaacgcccacgagcatcatggtgtttacaaccaggggcgcggaattgacagtggagagaggttgatgcagcctactcagatgtccgctcaggaggatctgggcgacgacactggtatccatgtgattccgaccttaaacggtgatgaccggcataagatcgtgaatgtggatcaaaggcaatatggtgatgtgtttaagggggatcttaatcctaaacctcaaggacagaggttgattgaggtctctgtggaggaaaatcatcctttcactctgcgtgcgcccatacagagaatctatggagttcgatacaccgaaacctggtcttttctgcctagtctgacatgcactggggacgccgcgccggcgattcagcacatatgcctgaagcataccacctgcttccaggacgtggtggtggatgtggattgtgccgagaataccaaggaggatcaactcgccgaaatctcatacaggttccagggcaagaaggaggccgaccagccgtggatcgtcgtcaatacaagtactctttttgacgagctggagctcgatccacctgagatcgagccaggtgtgctgaaagtgttgcgtactgaaaaacagtatctcggagtttatatttggaacatgaggggctctgatggtacaagcacatacgcaacctttctggtgacatggaaaggcgacgagaaaactcgtaaccccacccctgctgtgactccacagcctcggggggccgagtttcacatgtggaactaccattctcacgtgtttagtgtgggtgacacattttccctcgctatgcacctgcagtacaagatccatgaagccccctttgatcttctgctggagtggctctacgtgccgatagatccaacttgtcagcccatgaggttgtacagtacgtgcttgtaccaccccaacgccccccaatgtctgagccatatgaactccgggtgcacattcacgtcaccccatcttgcccagcgtgttgcgtccacggtgtatcagaactgcgagcacgcagataattacaccgcctattgccttggcatctcacacatggaacctagttttggcctgatcctccatgacggcggaactactctcaaattcgtggatacccctgagtctctgtccggcctgtacgtgtttgttgtatacttcaacggccatgtggaggctgtggcgtacactgttgtgagcactgtcgatcactttgtgaatgctatcgaggaaagaggctttcctccgacagctggacagccgcctgccaccactaagcccaaggagatcacacctgtcaatcccggaacctcgccactgataaggtatgccgcctggaccggcggcttggccgctgtggtgcttttgtgtttagttatttttttgatttgcactgcgaaacgcatgcgagttaaggcataccgggtggataagtcgccctacaaccagtctatgtactatgccgggctccccgtggacgattttgaggactcagagagcacggacacagaggaggagttcgggaacgcgataggggggtcccacggggggtcctcctacaccgtgtacatagacaagactcgg

SEQ ID NO: 107 - DNA, 1869 bp, synthetic construct
  source 1..1869: mol_type = other DNA
atgggaaccgtcaacaagcctgtggtgggagtcctaatggggttcggtattatcacgggtaccctgaggatcaccaaccccgttagggcttctgtcctacgctatgacgacttccatatcgatgaagataaactagatactaatagcgtgtatgaaccgtactaccacagcgaccatgctgagtcgtcgtgggtcaaccggggtgaatcttctaggaaggcttacgatcataattctccatacatctggccaaggaatgactatgatggttttctcgagaacgcgcacgaacatcacggcgtttacaaccaggggcgcggaattgatagtggtgagaggttgatgcaaccaactcagatgtccgctcaagaagatttaggcgacgatactgggattcatgtgattccgaccttgaatggcgatgaccgccataagatcgtgaatgtggatcaaaggcaatacggtgatgtgtttaaaggagatcttaatccaaagcctcaaggtcagaggctgattgaggtctctgtggaggagaaccacccctttactctgcgcgcgcctattcagaggatatatggcgttcggtataccgaaacttggtcgttcctgcccagtctaacatgcaccggggatgcggctcccgcaatccagcatatttgtctgaagcatacaacctgcttccaggatgtggtggtggatgttgactgtgcagagaacactaaggaggaccagcttgctgaaatttcttatagatttcagggcaagaaagaggcggaccagccttggattgtcgttaacacgagtactttgtttgatgagttggagctggatccgcctgagattgaacctggggtgctgaaagtgctgcgcactgaaaagcagtatcttggagtctatatatggaacatgaggggcagcgatgggacaagcacgtatgccacgtttctggtgacttggaagggcgacgaaaagaccagaaacccgacccctgctgtgacaccacagccgagaggggcggagtttcacatgtggaattatcattctcatgtgtttagtgtaggggacaccttctccctcgctatgcacttgcagtataagatccacgaagccccattcgatctgttgctggagtggctttacgtgcccattgacccgacttgtcagcccatgagactgtacagtacctgtttgtaccatcccaatgcaccccaatgtctctcgcatatgaactctggatgcactttcacctcaccccaccttgcccagcgggtggcctcgaccgtgtaccagaactgcgagcacgcagataactacaccgcctattgcctagggatctcccatatggaaccttcgtttggattaattctccatgatggcgggactactcttaagtttgtcgacacccctgaaagtctgtcaggcctctacgtgttcgtggtgtacttcaacgggcatgtggaggccgtggcttacaccgttgtgagcaccgttgatcacttcgtgaacgctatcgaggagagaggctttccgccaacggctggtcagccccctgcaacaaccaagccaaaggagatcacacccgtgaaccccggcaccagccctttgatccgttacgcagcatggaccggggggttggcagctgtggtgctgttgtgtctggttatcttccttatctgcaccgccaagcggatgcgggtcaaggcgtaccgggttgataagagtccttacaatcagtcaatgtactatgccggacttcctgtcgacgactttgaggattcagagtcaaccgacacagaggaggaattcggcaatgcgataggtggctcacacggtggctcatcctataccgtgtatattgacaagactagg

SEQ ID NO: 108 - DNA, 1869 bp, synthetic construct
  source 1..1869: mol_type = other DNA
atgggcactgtcaacaagcctgtggttggagtgctgatggggtttggtataatcacaggtaccttgaggataaccaatcctgttagggcctctgtgctgcgctatgatgacttccacattgatgaggataaactagacactaacagcgtgtacgaaccatattaccatagcgaccatgccgagtcctcctgggtgaataggggtgagtcttccaggaaggcctacgatcacaatagtccatacatctggccccggaatgactatgatggctttcttgagaacgcacacgagcatcacggtgtttataaccagggtcgcggaattgacagtggtgagaggttgatgcagcctactcagatgtccgctcaggaggacttgggcgacgatactgggatccatgtcatcccgaccctgaacggtgatgacagacataagattgtgaatgtggaccagaggcagtatggcgatgtgtttaaaggggacctgaatccaaagcctcagggacagaggctgattgaggtctctgtggaggagaatcatcccttcactctgcgtgctcccattcagagaatttacggcgttcggtacactgaaacttggtcttttctgcctagtcttacatgtaccggagacgccgctccggccatccagcacatatgcctgaagcacaccacctgcttccaggatgtggtggtggacgtggactgtgcagaaaacaccaaggaagaccaacttgctgaaatcagctaccggtttcagggcaagaaggaagcagaccaaccgtggattgtcgtcaacacatccactttgtttgacgagctggagctggatcctcccgagatcgaacccggcgtgctgaaagtgcttcgtactgaaaagcagtatctcggagtttatatttggaacatgaggggtagtgacggtacaagcacgtatgctacctttctggtgacttggaagggcgacgagaagacgcggaaccctacccctgctgtgacgccacagcctaggggagccgagtttcacatgtggaactaccattctcacgtgtttagtgtgggagatacgttttccctggctatgcacctccagtacaagatccacgaagcgcccttcgatcttctgctggagtggctctacgtgcccatagatccaacttgtcagcccatgagattgtacagtacatgcctgtaccatccaaatgcccctcaatgtctgagccatatgaactctggatgcactttcacgtcaccccatcttgcccagcgggttgcgtctacggtgtaccagaactgtgaacacgctgataattacaccgcctactgcctagggatctcccatatggaacctagtttcggtctaatcctccatgacggcggcaccactctcaagttcgtggatacacctgaaagcctgagcggtctctacgtgtttgttgtctactttaacgggcacgtagaggccgtggcttacactgttgtgtcgaccgtcgatcattttgtgaatgcgatcgaggagcgcgggtttcctccgacagccggacagccccctgccacgactaagcctaaggagattacccctgtgaatccaggaaccagtcccctgattcggtatgctgcgtggaccggcggtctggccgctgtggtgctgttgtgtctggtaatctttcttatttgcactgccaaacgcatgcgagtcaaggcttatcgggtggataagtcgccctacaaccagtctatgtactatgccggacttcccgtggacgattttgaggactcagaatctacggacacagaggaggagtttgggaacgcgataggaggatcccatgggggctcctcctatactgtgtatatagataagactcgt

SEQ ID NO: 109 - DNA, 1869 bp, synthetic construct
  source 1..1869: mol_type = other DNA
atgggaactgtcaataagcctgtggtgggagtgctgatgggattcggtatcatcactggaaccctgaggatcaccaatcccgttcgcgcttctgtgcttcgctatgacgatttccacatcgacgaagataagctagacactaacagcgtgtacgaaccgtactaccacagcgaccacgctgagtcctcttgggtgaaccggggtgaatcttctaggaaggcttacgaccataatagtccttacatctggccacggaacgactatgatggtttcctcgagaacgcacacgagcatcatggcgtttacaaccaggggcgcggaattgacagcggtgagaggttgatgcagcctacccaaatgtccgctcaggaggatctgggagacgacacgggtattcatgtgattccgaccttaaatggcgacgatcgccataagatcgtgaatgtggatcaaaggcaatatggtgatgtgtttaaaggtgatcttaatccgaaaccgcaagggcagaggttgattgaggtctctgttgaggagaaccaccccttcactctgcgcgctccaattcagcggatttacggagttcggtacacggagacttggtcttttctgcccagtctcacatgcacaggggatgccgctcctgccattcagcacatatgtctgaagcatacaacatgctttcaggatgtggtggtggatgtggattgtgcagagaacactaaggaagatcagcttgcagagatttcatacaggtttcagggcaagaaagaggcagaccagccctggattgtcgtcaacacaagtacattgttcgacgagctggagctggatccgcccgaaatcgagccaggggtgctgaaagtgctgcgcacagaaaagcagtatctgggtgtttatatatggaacatgaggggtagcgatggtaccagcacctatgcaacatttctggtgacctggaaaggtgacgaaaagaccagaaaccccactcccgctgtgaccccacagccacggggagcggagtttcacatgtggaattatcattcccatgtgtttagtgtaggggacactttctccctcgctatgcatctccagtataagatccatgaagcaccgtttgacttgttgctggagtggctttacgtgcccattgatccaacttgtcagcccatgagattgtatagtacgtgcttgtaccatcccaatgcaccccagtgtctctcacatatgaactccggatgtactttcacgtcacctcaccttgcccagcgggtggcttcgaccgtgtaccagaattgtgagcacgcggataactacaccgcctattgcctcggtatctcccacatggaacctagtttcggtctgattctccatgatggcggaactacccttaaattcgtggacacccctgagagtctgtctggcctctatgtattcgtggtgtacttcaacggacatgtggaggccgtggcgtacactgttgtgagcaccgtggaccacttcgtgaatgcgattgaggaacgtggctttccccctactgctggtcagccccctgctaccaccaagcccaaggagatcacgcccgtaaacccaggaaccagccctctgattcggtacgctgcatggaccggaggattggccgcagtggtgctgctgtgtctggttattttccttatttgcactgccaagcggatgcgagttaaggcctatcgggttgataaatcaccatacaatcagtcaatgtactatgccggactccccgtggatgattttgaggattcagagtcaaccgacacagaggaggagtttgggaatgcgataggagggagtcacggtggctcctcctataccgtgtatattgacaagactagg

SEQ ID NO: 110 - DNA, 1869 bp, synthetic construct
  source 1..1869: mol_type = other DNA
atgggcactgtcaataagcctgttgtaggggtgttaatggggttcggtatcatcacgggaacattgcggattactaaccctgttagggcttctgtgctgcgctatgatgactttcacatcgatgaagataaactagacaccaacagcgtgtatgagccatactaccatagcgatcatgccgagtcaagttgggtgaacaggggtgagtcttcccgaaaggcttacgatcataatagtccatatatctggccacggaatgactatgacggctttttggagaacgcacacgagcatcacggtgtttacaaccagggccgcggcattgacagcggtgagaggttgatgcagccaactcagatgtccgctcaggaggatttgggcgacgacactgggatccatgtgattccgaccttaaatggggatgaccgccataagattgtgaatgtggaccagagacagtacggcgacgtttttaagggcgacctcaatccaaagcctcaaggacagaggctgattgaggtgtctgtggaggagaaccaccctttcactctgcgtgctcccatccagagaatctatggcgttcggtataccgaaacttggtcttttctgcctagtctgacatgtaccggagacgcagcgcctgcgattcagcacatatgcctaaagcacaccacctgctttcaggatgtggtggtggatgtggactgcgccgagaataccaaggaagaccaactcgctgagatctcttataggtttcagggcaagaaagaggccgaccaaccgtggatcgtcgtcaacacaagtactttgtttgacgagctggagctggatccacctgagatcgagcccggcgtgctgaaagtgctccgtactgaaaaacagtaccttggagtttatatttggaacatgagggggtcagacgggacaagcacgtacgctacatttctggtgacttggaagggggatgaaaaaactcgaaaccccaccccggctgtgactccacagcctaggggggccgagtttcacatgtggaactaccattctcacgtgtttagtgtgggagatacattttccctcgctatgcacctccagtataagattcacgaagccccctttgatctcctgctggaatggctctatgtgcccatagaccccacttgccagcccatgaggctgtactcaacgtgcttataccatcccaatgccccccagtgtctcagccacatgaactctggatgcacttttacgtcaccccatcttgcccagcgggttgcttcaacggtgtaccagaattgtgagcacgccgataattacaccgcctactgtctcggaatttcccacatggaacccagttttggcctgatcctgcatgatggtggaacaacgctcaagttcgtggatacccctgagtcgttgtccggcctatacgtgtttgttgtgtacttcaacggacatgtggaggccgtggcatacactgttgtgagcaccgtcgaccatttcgtgaatgcgatcgaggagagaggctttcctccaaccgccggacaaccccctgccacaaccaagcctaaggagatcacacctgtgaatcctggcacctccccactgattcggtacgctgcttggacaggcggtctggccgctgtggtgctcttgtgtttagttattttccttatttgcactgcgaagcgcatgcgggtgaaagcatatcgggtggataagtcgccttacaaccagagtatgtactatgccggactccctgtggacgattttgaggactcagaatccacggacaccgaggaggagtttgggaacgctataggagggtcccacgggggctcctcctataccgtttacatagacaagactagg

SEQ ID NO: 111 - DNA, 1869 bp, synthetic construct
  source 1..1869: mol_type = other DNA
atgggcactgtcaacaagccagtggtgggggtgctaatggggttcggtatcatcacgggaacgttgaggatcacaaaccctgttcgcgcttctgtgctgcgctatgatgacttccatatcgatgaggataaactagatacaaatagcgtgtatgagccatactaccacagcgaccatgctgagtcaagttgggtcaataggggtgagtcttcccgtaaggcatatgaccacaatagtccatacatctggcctcggaatgactatgatgggttcctggaaaatgcccacgagcatcatggtgtttacaaccagggtcgcggtattgacagtggtgagaggctgatgcagcctactcagatgtccgctcaagaggatctgggcgatgacaccggcattcatgtgattccgaccttgaacggtgatgaccggcacaagatcgtgaatgtggaccagaggcagtacggcgatgtgtttaagggcgaccttaatcccaagcctcaaggccagaggttgattgaggtgtctgtggaggagaaccatccattcaccctgcgtgctcccattcagagaatctatggagttcggtataccgaaacttggtcttttctgcctagtctgacatgtacgggtgatgccgctccggccattcagcacatatgcctgaagcataccacgtgttttcaggacgtagtggttgatgtagactgtgcggagaataccaaggaggaccagctcgccgagattagctataggtttcagggcaagaaggaagcggaccaaccgtggattgtcgtcaataccagtacactgtttgacgagctggagttggacccccccgagatcgaacccggcgtgttaaaagtgcttcgtactgaaaagcagtatctcggagtgtatatatggaatatgaggggctccgatggtacaagcacatacgctacatttctggtgacatggaagggcgacgagaagaccagaaaccccacccctgctgtgaccccacagccaaggggggccgagtttcacatgtggaattaccattctcatgtgtttagtgtgggggataccttctctctcgctatgcaccttcagtacaagattcacgaggccccctttgatctcttactggagtggctctacgtgcccatagatccgacttgtcagcccatgagattgtacagtacctgcttgtaccatccgaacgccccccaatgtctgtctcatatgaactctgggtgcactttcacgtcaccacatcttgcccagcgggttgcgtccacggtgtaccagaactgcgagcatgcagataattacactgcctactgtctaggcatcagccacatggagcctagtttcggtctgattctgcatgatgggggcaccactctcaagttcgtggatacgcctgagagcctaagcggtctttacgtgtttgttgtttactttaacggacacgtggaggccgtggcctacactgttgtgagcaccgtggatcatttcgtgaacgccatcgaggaaagaggctttcctccaaccgctggacagccccctgccacaaccaagcctaaggagatcacccctgtgaatcccgggacctccccactgattcggtatgccgcatggacagggggtttagcggctgtggtgctgttgtgtctagtaatttttcttatttgcactgccaagcggatgcgagtgaaggcttatcgggtggataaaagtccctacaatcagtctatgtactatgccggacttcctgttgacgactttgaggactcagagtcgaccgacacagaggaggaatttgggaacgcaataggagggtctcacggaggctcctcctatactgtgtatatagacaagactagg

SEQ ID NO: 112 - DNA, 1869 bp, synthetic construct
  source 1..1869: mol_type = other DNA
atggggactgtcaataagcctgtggttggggttttaatggggtttggtatcattactgggacactcaggatcaccaatcctgttagggcctcagtgctgcgctatgatgactttcacatcgatgaggataaactagataccaacagcgtgtatgaaccgtactaccacagcgaccatgctgagagttcctgggtaaatcgcggtgaatctagccgcaaggcttatgatcataattctccatatatctggccacggaatgattatgatggctttcttgagaacgcccacgagcaccacggagtctacaaccagggccgcggaattgacagtggtgaacgtttgatgcagcccactcaaatgtccgcccaggaggatctgggcgacgacactgggatccatgtgattccgaccttgaacggtgacgaccggcataagattgtgaatgtggatcagaggcagtatggcgacgtgttcaagggcgaccttaatcctaagcctcagggacagaggttgattgaggtgtctgtggaggaaaaccatcctttcacactgcgggctcccattcagagaatctatggtgttcggtataccgaaacttggagctttctgcccagtctgacatgtaccggggacgccgccccggccattcagcacatctgcctgaagcatacgacatgcttccaggatgtggtggtggatgtcgactgtgccgagaataccaaggaggatcaactcgctgagatcagctatcgatttcagggcaagaaggaggctgaccaaccgtggatcgtcgtcaatacaagtactctgtttgacgagctggagctcgatccacccgagattgagcccggcgtgttgaaagtccttcgtacggagaagcagtacctcggagtgtatatctggaacatgcgggggagcgacggtacaagtacgtacgctaccttcctggtgacatggaaaggtgacgagaaaacaagaaaccccacccctgctgttactccacagcctaggggtgctgagtttcacatgtggaattaccacagccacgtgtttagtgtgggagataccttctccctggctatgcatctccagtacaagatccacgaggctcccttcgatttactgctggagtggctctacgtgcctattgatccaacgtgtcaaccaatgagattgtacagtacgtgcttgtatcaccccaacgcaccccaatgtctgtctcatatgaattctgggtgcactttcacatctccccatcttgcccagcgggttgcctcaacggtataccagaactgcgagcacgcagacaactacaccgcctactgcctgggtatctcacatatggaacctagtttcggcctgattctccatgacggcggcactactctcaaattcgtggatacgcctgagagcctgagcggtctctacgtgtttgttgtgtactttaacggacacgtggaggccgttgcctacaccgttgtgagcaccgtggaccacttcgtgaacgcgattgaggaaagaggctttcctccgaccgctggacagccccctgccaccaccaagcctaaggagattacacccgtgaacccgggaacctccccactgattcggtatgctgcttggaccggggggctggccgccgtggtgctgttgtgtctggtaatttttcttatttgcactgccaaacgcatgcgagtgaaggcttatcgagtggataagtcgccttacaatcagtcgatgtactatgctggtctccctgtggacgattttgaggattcagaatccactgatacagaggaggaattcgggaacgcgataggagggtcccacggggggtcgtcctataccgtgtacatagataagactagg

SEQ ID NO: 113 - DNA, 1869 bp, synthetic construct
  source 1..1869: mol_type = other DNA
atgggcactgtcaataagccagtagtgggggtcctgatggggtttggtattattactggcacgctcaggataactaaccctgtgagggcctctgtgctgcgctatgacgactttcacatcgatgaggacaaactagataccaacagcgtgtatgagccatactaccattctgaccatgcggagagtagttgggtgaataggggtgagtcttcccgcaaggcttatgaccacaatagtccatatatctggcccagaaatgactatgatggctttcttgagaacgcccatgagcatcacggtgtttacaaccagggccgcgggattgacagtggtgaaaggttgatgcagcctacccagatgtctgcccaggaggacctgggcgacgacactgggatccatgttattccgactcttaatggcgacgatcgtcacaagatcgtgaatgtggatcagaggcagtatggcgatgtgtttaagggtgaccttaatccaaagcctcagggacagaggttgattgaggtgtcggtggaggaaaaccatccattcactctccgtgcccccattcagagaatctatggagtacggtataccgagacttggtcttttctgcccagtcttacgtgtaccggggacgccgccccggccatccagcacatctgcctgaagcatacaacatgctttcaggatgtggtggtggacgtggattgtgcagagaacaccaaggaggatcaactcgctgaaatctcttacaggtttcagggcaagaaggaagcagaccaaccttggattgtcgtgaatacgagtactctgttcgacgagctggagctcgatcctcccgagatcgagcccggcgtgctgaaggtgctacgtactgaaaaacagtatctcggagtatatatttggaacatgagggggtcagatggtacgtcaacgtacgctacttttctggtgacgtggaagggcgacgagaagactcgaaatcccactccggcagtgactccacagcctaggggagccgagtttcacatgtggaactaccatagccacgtgtttagtgtgggagatacgttttccttggctatgcacctccagtataagattcacgaggcccccttcgatcttttactggagtggctctacgtgcccattgatcccacttgtcagcctatgagactgtattctacgtgcctgtatcatcctaacgcccctcaatgtctcagccatatgaattctggatgcactttcacgtcaccccatcttgcccagcgggttgcgtccacggtgtaccagaactgtgagcacgcagataattacaccgcctattgcctaggcatctcacacatggaaccttcattcggcctgatcctgcatgatggtggcactaccctcaagttcgtggatacccctgagagcctgagtggcctatacgtgttcgttgtctacttcaatggacatgtcgaggccgtggcctacacagttgtgagcaccgtcgaccatttcgtgaatgcgatcgaggaaagagggtttcctccaaccgctggacaaccccctgcgacaactaagcctaaggagatcacacccgtgaatcccggaacctcgcccctgattcgctacgcggcctggaccggcggtctggccgcggtggttctgctgtgtttagtaatttttctcatctgcaccgccaagcggatgcgggtgaaggcttaccgggtggacaagtcgccttacaaccagtctatgtactatgccggattgcctgtggacgattttgaggactcagagtctacggacacagaggaggagtttgggaacgcgataggagggtcccatgggggctcctcctacaccgtgtacatagataagactagg

SEQ ID NO: 114 - DNA, 1869 bp, synthetic construct
  source 1..1869: mol_type = other DNA
atgggcactgtcaacaaaccagtggtgggggtcctgatggggttcggtatcatcacgggaacgttaaggataactaaccccgtcagggcctctgttctgcgatatgatgacttccatatcgacgaggataaactagataccaacagcgtgtatgagccatactaccacagcgatcatgctgagtcatcctgggtgaacaggggtgaatctagccgcaaggcttatgatcataatagtccctatatttggccacggaatgactacgatgggtttcttgagaatgcccacgagcatcacggtgtttacaaccagggccgagggattgacagcggagagaggctgatgcagcctactcagatgagtgctcaggaggatctgggcgacgacactgggattcatgttattccgaccttaaacggtgatgaccggcataagatcgtgaatgtggatcaaaggcagtacggcgatgtgtttaagggcgaccttaatcccaaacctcaggggcagaggttgattgaggtgtctgtggaggagaaccaccctttcacactgcgggctcccattcagagaatctatggagttcggtacaccgaaacttggtcttttctgcccagtctgacatgcactggagatgccgctccagccattcagcacatctgcctgaagcacaccacctgtttccaagacgtggtggtggatgtagactgtgccgagaataccaaggaggatcaacttgccgagatctcttacaggtttcagggcaagaaagaggccgaccaaccttggatcgtcgtgaacacgagtactttattcgatgaactggagctggatccccctgagattgagcccggggttctgaaagtgcttagaactgaaaagcagtatctgggagtttatatctggaacatgagggggtccgatggtacgagcacgtacgccacattcctggtgacatggaagggcgacgagaagaccagaaaccccacccctgctgtgaccccgcagcctaggggggcggagtttcacatgtggaattatcattctcacgtgtttagcgtgggagacacattttccctggctatgcaccttcagtacaagattcacgaagccccttttgatctcctgctggaatggctctacgtgcccatagatccaacttgtcagccgatgagactgtacagtacgtgcctgtatcatcccaacgctccccagtgtctttctcatatgaactccggatgcactttcacgagtcctcatcttgcccagcgggttgcctccacggtgtaccagaactgtgagcacgcagataattacactgcctactgccttggcatctcccacatggaacctagttttgggctcatcctccatgatggcggcacaactcttaagttcgtcgataccccggagagcctcagcggtctctacgtgtttgttgtctacttcaacgggcatgtggaggctgtggcctacaccgtggtgagcaccgtcgatcatttcgtgaacgcgatcgaggaaagaggctttcctccgaccgctgggcagccccctgccacaaccaaacctaaggagattacacctgtgaacccagggacctctccattgattcggtatgctgcttggaccggaggtctggcggctgtggtcctgttgtgtttagtgatatttcttatttgcacagccaaacgcatgcgagtgaaggcatatcgcgtggataagtcgccttacaaccagtctatgtactatgccggcctccccgtggacgattttgaggactcagaatccacggacacggaggaggagtttggcaatgctataggagggtctcacgggggctcctcctataccgtctatatagacaagactcgg

SEQ ID NO: 115 - DNA, 1869 bp, synthetic construct
  source 1..1869: mol_type = other DNA
atgggcactgtcaataagccggttgtgggcgtgttgatggggttcggtatcatcactggaacattgaggataacgaaccctgtacgagcgtctgtgctgcgctatgacgacttccatatcgatgaggataagctagatactaacagcgtctatgagccttattaccatagcgatcatgctgagtcatcatgggtgaacaggggtgagtcttcccgcaaggcttatgatcataatagtccatacatctggccacggaatgactatgatggctttctggagaatgcccacgagcatcacggtgtttataaccagggccgcggaattgacagtggtgagaggcttatgcagcctactcaaatgtccgctcaggaggatctgggcgacgacactggaatccatgtgattccgactttaaatggtgatgaccgccataagatcgtgaatgtggatcagaggcagtacggcgatgtatttaagggcgaccttaaccctaagccacagggccagaggttgattgaggtgtctgtggaggaaaatcatcctttcactctgcgagctccgattcagagaatctatggcgttcgttacaccgaaacttggtccttccttcctagtctgacctgcactggggacgctgctcctgccatccagcacatatgcctgaagcacacgacatgcttccaggacgtggtggtggatgtagattgtgcagagaacaccaaggaggatcaactggctgagatctcatataggtttcagggaaagaaggaggcagatcagccttggatagtcgtcaacacgagtactctctttgacgaactcgagctggatcctcccgagatcgaaccgggcgtgctgaaagtgcttcgtactgagaagcagtatctcggagtttatatctggaatatgagggggtccgatggtaccagcacgtacgcaacctttctggtgacatggaagggcgacgagaagactagaaaccccactcctgctgtgactcctcagcctaggggggccgagtttcacatgtggaattaccattcccacgtgtttagtgtgggagatacatttagtctcgctatgcacctccagtacaagattcacgaggccccctttgacttgctgctggagtggctttacgtgcccatagaccccacttgtcaacccatgaggctgtatagtacctgcctgtatcatccaaacgccccccaatgcctgagccatatgaactctggatgtacttttacaagtcctcatcttgcccagcgggttgcgagtacggtgtatcagaactgcgagcatgcagataattacactgcctattgcctaggaatctcccacatggaacctagtttcggcctgatcctgcatgacggtggaactactcttaagttcgtggatacccctgagagcctgagcggcctctatgtgttcgttgtctactttaacggacacgtggaggccgtggcttatacagttgtgagcaccgttgaccatttcgtgaacgcgatcgaggagagaggctttcctccgaccgctgggcagccccctgccacaaccaagcctaaggagatcactcctgtgaacccggggaccagcccactgatccgatatgctgcctggaccggcggtctggcagccgtggtgctgttgtgtttagttatcttcctcatttgcactgcgaagcgcatgcgagtgaaggcatatcgggtggacaagtcgccctacaatcagtctatgtactatgctggactccctgtcgatgattttgaggactcagaatctacagacacagaggaggagttcggaaacgcgataggtggatcccacggggggtctagctataccgtttacatagataagactagg

SEQ ID NO: 116 - DNA, 1869 bp, synthetic construct
  source 1..1869: mol_type = other DNA
atgggtacggtcaacaagcctgtggtcggggtgctgatggggttcggtatcatcacgggaaccttgaggatcacgaaccctgttagggcctctgtgctgcggtatgatgacttccacatcgatgaagataagctggacaccaacagtgtgtatgagccatattaccatagcgaccatgccgagtcatcctgggtgaataggggcgaatcttccaggaaggcctatgatcataatagtccatatatctggcccagaaatgactatgatggctttttggagaacgcccacgagcatcacggtgtttacaaccagggccgcggaattgactccggtgagaggttgatgcagcctactcagatgtccgcccaggaggatctgggcgacgatacaggaatccatgttattcctaccttaaacggtgacgaccggcataagatagtgaatgtggatcagaggcagtacggcgatgtttttaagggcgaccttaatccaaaacctcagggtcagaggttgattgaggtgtctgtggaggagaaccatcctttcactctgcgagctcccatccagcggatctatggggttcggtataccgagacttggtcttttttgcctagtctgacatgtactggcgacgccgccccggccattcaacacatatgtctgaagcataccacctgcttccaggacgtggtggtggatgtagactgcgcagagaatactaaggaggatcaactcgctgagatctcttacaggtttcagggtaagaaggaggctgatcaaccgtggatagtcgtcaacacgagtactctgttcgacgaactggagctggatcccccggagatcgagcccggggtgctgaaagtgcttcgtactgagaaacagtacctcggagtttatatttggaacatgagggggtctgatggtacaagcacgtacgctacctttctggttacatggaagggcgacgagaagactagaaatcccacccctgctgtgactccacagcctaggggggccgagtttcacatgtggaattatcattctcacgtgtttagtgtgggagatacatttagtctggctatgcacctgcagtacaagatccatgaagcccccttcgatttactgctggagtggctctacgtgcccatcgatccaacttgtcagccaatgagattgtacagtacgtgcctgtaccatcccaacgcccctcagtgtttgagccatatgaattctggatgtacttttacgtccccccatctcgcccagcgagttgcgtccacggtgtaccagaactgtgagcacgcagataattataccgcctactgtctgggcatctcacacatggagcctagtttcgggctgatccttcatgatggtggaaccacactcaagttcgtagatacccccgaatccttgagcggcttgtacgtgttcgttgtatacttcaacggacatgtcgaggccgtggcctacactgtcgtgagcaccgttgatcatttcgtgaacgcgatcgaggagagggggtttcctccgacggctggacagccccccgccacaaccaagcctaaggagatcacgcctgtcaatccaggaacctcgcccctgatacggtatgccgcttggaccggcgggctcgccgccgtggtgttgttgtgtttagttatctttttgatttgtactgccaagcggatgcgagtcaaggcatatcgggtggataagtcgccctacaatcagtctatgtattatgccggactgcctgtggacgattttgaggactcagagtctaccgatacggaggaggagttcgggaacgccataggagggtcccatgggggctccagttataccgtgtatatagataagactagg

SEQ ID NO: 117 - DNA, 1869 bp, synthetic construct
  source 1..1869: mol_type = other DNA
atgggcactgtcaacaagcctgtggtgggggtcctgatggggttcgggatcatcacagggacattgaggattactaaccctgttcgggcctctgtgctgcgctatgatgacttccatatcgatgaggataaactggataccaacagcgtgtatgagccatattaccatagcgaccatgccgaatcatcctgggtgaatcgcggggagtcatctcgtaaggcttatgatcataatagtccgtacatctggcccagaaacgattatgatggctttcttgagaatgcccacgagcatcacggtgtttacaaccagggccgcggaattgacagtggtgagaggttgatgcagcctactcagatgtccgctcaggaggatctgggcgacgacactgggattcatgtgattccgactttgaacggtgatgaccggcataaaatcgtgaatgtggatcagaggcagtacggcgatgtgtttaagggcgatcttaatccaaagcctcagggacagaggttgattgaggtgtccgtggaggagaaccatccctttacgctgcgtgctcccatacagagaatctatggggttcggtataccgaaacttggagctttctccctagtctgacatgtacgggcgacgctgctcccgctatccagcacatatgtctgaagcacacaacgtgcttccaggacgtggtggtggatgttgactgtgccgagaataccaaggaggaccaacttgcagagatcagctacaggtttcagggcaagaaagaggcagaccagccgtggattgtcgtcaacacatctacgctgtttgacgaactggagctcgatcctcctgagattgagcccggcgtcctgaaagtgctgcgtactgaaaagcagtacctcggagtttatatttggaacatgaggggtagtgatggtaccagcacgtacgctacgtttctggtgacatggaaaggcgacgagaagacacgaaaccccacccctgctgtgactccacagccaaggggggccgagtttcacatgtggaattatcattctcacgtgtttagtgtgggcgatacattttctctcgctatgcacctccagtataagatccatgaagcacctttcgatctactactggagtggctctacgtgcccatagatccaacctgtcagcccatgagattgtacagtacgtgtctgtaccatcccaacgctccccaatgtctgagtcatatgaactctggttgtactttcacgtctccccatctcgcccagcgggttgcctccacggtgtaccagaactgcgagcatgcagacaactacactgcctattgcctcgggatctcccatatggagcctagtttcgggctcatcctccatgatggcggcaccactctcaaattcgtggatactcctgagagcctgagcggcctgtacgtgttcgtagtctactttaacggccatgtggaggctgtggcctacactgttgtaagtactgtcgaccatttcgttaacgcaatcgaggaaaggggctttccgccgactgccggacagccccccgccacaacaaagcctaaggagatcacccctgtgaaccccggtacttccccactgattcggtatgctgcttggactggcggtctggccgcagtcgtgctgttgtgtttagtaatttttctgatttgtacagccaaaaggatgcgagtgaaagcttatcgagtggacaagtcgccttacaaccagtcaatgtactatgccggactccctgttgatgattttgaggactcagaatctaccgacaccgaggaggagtttgggaacgcgataggaggctctcacggggggtcatcctacactgtgtacatagataagactcgg

SEQ ID NO: 118 - DNA, 1869 bp, synthetic construct
  source 1..1869: mol_type = other DNA
atggggactgtcaacaaacccgtggtcggagtgctgatggggttcggtattatcacggggactctccggataactaaccctgttcgcgcctccgtgctgcgttatgatgacttccacatcgatgaggacaaactagacaccaactctgtgtatgagccatactaccacagcgaccatgctgagtcatcttgggtcaataggggagagtcttccagaaaggcttatgatcataacagtccatatatctggccccggaatgattatgatggctttctggagaacgcccacgagcatcacggtgtttacaaccagggccgcggaattgacagtggtgagagattgatgcagcctactcaaatgtccgcccaggaggatctgggcgatgacacggggatccatgtgattccgaccctgaatggtgacgaccgccataagatcgtgaatgtggatcagaggcaatacggcgacgtgttcaagggcgaccttaatccgaagcctcagggccagaggttgattgaggtgtctgtggaggagaaccatcctttcactctgcgtgctcccatccagagaatctatggagttcggtataccgaaacttggtcttttctgcctagtctgacctgtaccggggatgccgcccccgccatccagcacatatgcctgaagcacaccacgtgctttcaggacgtggtggtggatgtagattgtgcagagaataccaaggaggatcagctcgctgagatctcttataggtttcagggtaagaaggaggctgatcagccttggatcgtcgtcaacacgtccactctgtttgacgagctggagctggatcctcccgagatcgagcctggcgtgctgaaggtgcttcgtactgagaaacagtatctcggagtctatatctggaacatgagggggtcggacggtacaagcacgtacgctacatttctggtgacatggaagggcgacgagaagactagaaacccgactcccgctgtgactccacagcccaggggtgccgagtttcacatgtggaattatcattctcacgtgtttagtgtgggagatacatttagtctcgctatgcacctccagtacaagattcacgaagcccccttcgatctgctactggagtggctctacgtgcccattgatccaacttgtcagccgatgagactgtacagtacgtgcctgtatcacccaaacgctccccagtgtctaagccatatgaactctggatgcaccttcacatccccccatcttgcccagcgggttgcttctacggtgtatcagaactgtgagcacgccgacaattacaccgcctattgcctaggcatcagccacatggaaccctcgttcggactgatcctccatgatggtggaactactctcaaattcgtggacacgcctgagagcctgagcggcctgtacgtgtttgttgtgtactttaacggacatgtggaggccgtagcttacaccgttgtgagcaccgtcgatcatttcgtgaacgcgatcgaggagagaggatttcccccgaccgctggacagccccctgccaccacaaagcctaaggagatcacacccgtgaatccaggcacatccccattgattcggtatgctgcatggaccggcggtctggccgccgtggtgctgctttgtctggtaattttcctgatttgtactgctaagcgcatgcgagttaaggcataccgggttgacaagtccccatacaatcagtctatgtactatgccgggcttcctgtcgacgattttgaggactcagaatcgaccgacacagaggaggagttcgggaacgcgataggtgggtcccacgggggctcctcctacaccgtgtacatagataagactcga

SEQ ID NO: 119 - DNA, 1869 bp, synthetic construct
  source 1..1869: mol_type = other DNA
atgggcaccgtcaacaagcccgtggtgggagtcctgatgggattcggtattatcactggcaccctcaggatcaccaatcccgtcagggcttctgtcctacgctatgacgatttccacatcgatgaagacaagctggacactaatagcgtgtatgaaccatactaccacagcgaccatgcggagtcatcatgggtcaaccggggcgagtcttctaggaaagcctacgatcataatagtccatacatctggccacggaatgactatgatggttttttggaaaacgctcatgagcatcacggcgtttacaaccaggggcggggaattgacagtggtgagaggttgatgcagcctactcagatgtccgctcaggaggatctgggcgacgacactggcattcatgtgattccgaccttgaacggcgacgaccgccacaagatcgtgaatgtggaccaacggcaatatggtgatgtgtttaaaggggatctgaatccaaagcctcaaggacagaggctgattgaggtctctgtggaggagaaccatcctttcactctgcgcgctccaattcagaggatctacggagttcggtataccgaaacttggtcgttcctgcccagtctcacatgcaccggggatgctgctccagcgatccagcacatttgcctcaagcatacaacttgcttccaggatgtggttgtggatgtggactgtgcagagaacaccaaagaggaccagctggctgagatctcttacagatttcagggcaagaaggaggctgaccagccatggatcgtggttaacacctctaccctgttcgatgaactggagcttgatcctcccgaaatcgaaccaggggtgctgaaagtgctgcgaacagaaaagcagtatctcggggtatacatatggaacatgaggggtagcgatgggaccagcacgtatgcaacgttcctggtgacttggaagggcgacgaaaagacacggaaccccacgcctgctgtgaccccacagcctagaggcgcggagttccacatgtggaattaccattctcatgtctttagcgtaggggacacattctcactggctatgcacttacagtataagatccatgaagccccattcgatctcctgctggagtggctttacgtgcccattgacccaacttgccagcccatgcgtctgtatagcacctgcttgtaccaccccaatgcaccccaatgtttgtcccatatgaactctggatgcaccttcacttcaccacaccttgcccagcgggtcgcctctaccgtgtaccagaactgcgagcatgcagataattacaccgcctattgcctaggcatctcccatatggaacctagtttcggcctgatcctgcatgacggcggaaccactcttaagttcgtcgatacccctgaaagcctgagcggcctctatgtgtttgttgtgtattttaacggacatgtggaggccgtggcttacaccgttgtgagcaccgttgatcacttcgtgaacgcgatcgaagaacgtggttttcctcctacggctggtcagcccccagctaccaccaagcccaaggagattacccccgtgaaccctgggacgtcccccctgatccggtatgctgcctggaccgggggcttggccgcagtggtgctgttgtgtctggttatcttcctgatttgcaccgctaagcgcatgcgagtcaaggcctatcgggttgataagagtccttacaaccagtcaatgtactatgccggactccctgtggatgattttgaagattcagagtcaacggacacagaggaggaattcggcaatgcaataggagggtctcatggaggctcctcttataccgtgtacattgacaagactagg

SEQ ID NO: 120 - DNA, 1869 bp, synthetic construct
  source 1..1869: mol_type = other DNA
atgggcactgtcaataagccagtcgtgggtgtgctcatggggttcggtattatcacgggaacactgcgcataacaaaccctgttagggcatctgtgctgcgctatgacgacttccacatcgacgaggataaactagataccaacagcgtgtatgaaccatattaccatagcgaccatgctgagtcaagttgggtgaataggggtgagtcttcccgcaaggcttatgatcataatagtccatacatctggccccggaatgactatgatggctttcttgagaatgctcacgagcatcacggtgtttacaatcaaggccgcgggattgacagtggcgagcgtctgatgcagccaactcagatgtccgctcaggaggatctgggcgacgacactgggattcatgttatcccgacattaaacggtgatgaccggcataagatcgtgaacgtggatcagaggcagtacggcgatgtgtttaagggcgaccttaatcctaagcctcagggacagaggctgattgaggtgtctgtggaggaaaaccatcctttcactctgcgtgctcccattcagagaatatatggtgttcggtatactgaaacttggtcttttctgcctagtctgacatgcactggagacgccgctccggccattcagcacatatgcctgaagcataccacctgcttccaggatgtggtggttgatgtcgactgtgcagagaataccaaggaggatcaactcgccgagatctcctacaggtttcagggcaagaaggaggcagaccagccgtggattgtcgtcaacacaagtaccttgtttgacgagctggagctcgatcctcctgagattgagcccggcgtgttgaaagtgcttcgtacagagaagcagtatctcggagtgtatatctggaacatgaggggttccgatggtacttctacgtacgccacatttctggtgacatggaagggcgacgagaaaactcgaaatcccacacctgctgtgactccacagcctaggggggctgagtttcatatgtggaattaccattctcatgtgtttagtgtgggagataccttttccctcgctatgcacctccagtacaagattcacgaggcccccttcgatcttctactggagtggctctacgtgcccattgatccaacttgtcagcccatgagactgtacagtacgtgcctgtatcatccgaacgcccctcaatgtttatcacatatgaattctggatgcactttcacttctccccatctcgcccagcgggttgcatccacggtgtatcagaactgcgagcatgcagataattacaccgcctattgcctggggatctcgcacatggaacccagtttcggcctgatcctccatgatggcggaactacactcaagttcgtggacactcctgagagcctgtcgggcctatacgtgtttgttgtctactttaacgggcatgtagaggccgtggcctatactgtcgtgagcaccgtagatcattttgtgaatgcgatcgaggaaagaggctttcccccgaccgcaggccagccccctgccacaaccaagcctaaggagattactcctgtgaaccccggtacatcaccactgattcggtatgctgcctggaccggaggtctggccgccgtggtgctgttatgtttagtgatctttttgatttgcaccgcaaagcggatgcgagtgaaagcgtatcgggtggataagtcgccctacaaccagtctatgtactatgccggactccctgtggatgattttgaggattcagaatccaccgacacagaggaggagtttgggaacgcgatcggagggtcccacgggggctcctcctataccgtgtacatagataagactcgg

SEQ ID NO: 121 - DNA, 1869 bp, synthetic construct
  source 1..1869: mol_type = other DNA
atgggcacagtgaacaagccagtggtaggcgtgctgatgggcttcggcatcatcactggaaccttgcggatcacaaaccccgtgagggccagcgtcctgcgttacgatgacttccacatcgacgaggacaagctggacactaacagtgtatacgagccatattaccactccgatcatgcagagagttcctgggtgaatcgcggggagagcagccggaaggcttatgaccacaactctccctacatctggccccggaacgactatgatggcttcctggagaacgcccacgagcaccacggggtgtataaccaggggcgtggcatagattccggggagaggctgatgcagcctacccagatgtccgcccaggaagatctcggggatgatactggaatccacgtgattccaaccctgaacggggacgaccggcacaagatcgtcaacgtggatcagcgccaatatggcgacgtttttaagggggacctgaaccccaagcctcagggccagagactcattgaggtgtcagtggaggaaaaccaccccttcaccctccgcgcacctatccagcgtatttatggggtgcgttacaccgagacttggagctttctgccaagtctcacctgcacaggcgacgccgccccagctatacagcatatttgtctgaagcatacaacatgcttccaagacgtggtggtggacgtcgactgtgcagaaaacaccaaggaggatcagcttgctgaaatctcttaccgatttcagggtaagaaggaggctgatcagccttggattgtggtgaacacgagcaccctatttgatgagctggagctggaccctcccgagatcgagcccggggtgctgaaagttctccgcacggagaagcagtacctcggggtctatatctggaatatgagaggctctgacgggacctctacatacgctacgtttctcgtcacctggaaaggtgacgagaagactcggaaccccaccccagctgtgactccacagcccaggggtgcggagttccacatgtggaattaccattcacacgtgttctctgtgggggacacattcagccttgccatgcatctgcagtataaaattcacgaggccccctttgacctgctgctggagtggctgtatgtgcccatagacccgacctgtcagcccatgagactgtactcaacatgcctctaccatccaaacgcaccacagtgcctgagccacatgaattcgggctgcacttttaccagccctcacctggctcagagggtggcctcaacagtgtaccagaactgcgagcacgcagataattacactgcgtattgtttgggtatcagtcatatggagcccagtttcgggctcattctgcatgacggaggcactaccctcaagttcgtggatactcccgagagcttgagcggcctctacgtgttcgttgtttacttcaacggacacgtggaggccgtggcgtacaccgtagtgtccacagtggatcacttcgtgaacgccattgaggagcggggcttcccgcccaccgccggccagcctccggcaaccacgaagccgaaggagataactcccgttaatcccgggacgtcccctttgataaggtatgcagcgtggaccggaggtctggccgcggtggtgctcctctgtctggtgattttcttgatttgcaccgccaagcggatgcgagtcaaggcatacagggtggacaagtcaccctacaatcagagtatgtactacgccgggctccctgtggatgactttgaggactccgaatcaaccgacactgaggaggagttcggcaacgccatcggagggagccacggcggctcgtcatacactgtgtacatcgacaaaactcgg

SEQ ID NO: 122 - DNA, 1869 bp, synthetic construct
  source 1..1869: mol_type = other DNA
atgggtaccgtgaataagcccgtggtaggcgtgctcatgggctttggtataattaccggcacactgcggattacaaatcctgtgcgtgccagcgtcctgagatacgatgacttccacatcgacgaggacaagctggatacaaacagcgtctatgagccatattaccacagcgatcatgccgaatcctcctgggtgaataggggggagtcaagccgcaaggcgtacgaccataactccccctacatctggccccggaatgactatgacgggttcctggagaacgcccatgagcaccatggagtgtacaaccagggacgcggcatagattctggggagaggctgatgcagcctacacagatgtccgcccaggaggatttgggagatgataccgggattcacgtgatccccactttaaacggggacgatcgccacaagatcgtcaacgtggatcaaagacaatacggtgacgtcttcaagggggacttgaatcccaagcctcagggccagcggctgatcgaggtaagcgtggaggagaaccatcccttcaccttgcgggctcccatccagcggatctacggggtacgatacaccgagacttggagttttctgccaagtctcacatgcacaggcgacgccgcccccgccatccagcatatttgcttgaagcatacaacatgtttccaggatgtggtggtggacgtcgactgtgcagaaaataccaaggaagatcagctggctgagatttcttaccgcttccagggtaagaaagaggccgatcagccttggatcgttgtcaacacgagtaccctgtttgacgagctggaacttgatccgccagagatagagcccggggtcttgaaggttctccgcacggaaaaacagtacctgggagtgtacatctggaacatgaggggttccgacgggacctcgacctatgccaccttcctggtgacctggaagggggacgagaagacgcggaaccccaccccggctgtcaccccgcagccccggggagcggagtttcacatgtggaactaccactcccacgtgttttccgtgggggataccttctctcttgctatgcatttgcagtacaagatacacgaggcccccttcgatctgctgctggagtggctgtatgtgcccattgatcctacttgtcagccgatgcggctgtatagcacctgcctttaccaccccaacgccccacagtgtctgagccatatgaactcgggctgtacttttactagcccgcacttggctcagagggtggccagtacagtgtaccaaaactgtgaacacgctgacaactacaccgcgtattgtctgggcatcagccacatggagcccagttttgggctcattcttcacgatgggggcaccaccctcaaatttgtggatacccctgagagcttgagcggcctgtatgtgttcgttgtgtacttcaacggacacgtggaggccgtggcgtacacagtggtcagcacagttgaccacttcgtgaacgccattgaggagcgtgggttcccgcccaccgccggccagcctcctgcgaccacgaagccgaaggagatcacccctgtgaacccagggacgtctccactgattcgctatgctgcgtggacaggaggcctggccgcggtggtgctcctctgccttgtgatttttttgatttgcaccgcaaagcggatgcgagtcaaagcttatagggtggataagtccccctacaatcaatccatgtattacgccgggctgcccgtcgatgactttgaggattccgagtccacagacactgaggaggagttcggcaacgccatcggcggcagccacggtgggtcatcttatactgtttacattgacaaaacaaga

SEQ ID NO: 123 - DNA, 1869 bp, synthetic construct
  source 1..1869: mol_type = other DNA
atgggcaccgtgaataagccagtggtaggagtgttgatgggcttcggcattatcactggcaccttgcgcatcacaaaccctgtgcgagccagcgtcctgcgttacgatgacttccacatcgacgaggacaagctggatacgaatagcgtgtatgagccatattaccactccgatcatgcagagtcctcctgggtgaacaggggggagtctagccggaaggcttacgaccacaattccccctacatctggccccggaacgattatgacgggttcctggagaacgcccatgagcatcatggagtgtataaccagggacgcggcatcgattccggggagcggctcatgcagcctacccagatgtccgcccaggaggacctcggggatgataccgggatccacgtgattccaaccctgaatggggacgatcggcacaagatcgtcaacgtggatcaacgccaatatggcgatgttttcaaaggggatcttaaccctaagccccagggccagcggctaatcgaggtgagtgtggaggagaaccatccattcaccttgagagccccgatccagcgtatctatggggtgcgttatactgagacttggtcattcctgccgagtcttacctgcaccggtgatgccgccccagctatacaacacatatgtctcaagcataccacatgctttcaggacgtggtggttgatgttgactgtgcagagaacaccaaggaggatcagcttgcagagatttcttaccgctttcagggtaagaaggaggctgatcagccttggatcgtggtgaacacgagcaccctgtttgatgagctggagctggaccctccggagattgaacccggggtgttgaaggtgctgcgcaccgagaaacaatacctcggggtgtatatctggaatatgagggggtccgacgggacctccacatatgccacttttctcgtcacctggaaaggtgacgagaagacccggaaccctacccccgctgtgaccccacagccgcggggtgcggagtttcacatgtggaactatcatagccacgtgttctcggtgggcgataccttcagcctggcaatgcacctgcagtacaagatacacgaggccccctttgatctcctgttggagtggctgtatgtgcccatcgaccccacatgccagcctatgcggttgtactccacctgcctgtaccatcctaacgcaccacagtgcttgagccatatgaattcgggctgcactttcaccagccctcatctggcccagagggtggcctcaacagtgtaccaaaactgtgaacacgctgacaattacactgcgtattgcctgggtattagccatatggagcctagttttgggctcattctgcatgacggtggcacaaccctcaagttcgtggacacccccgagagcttgagcggcctctacgtgttcgttgtgtacttcaatggacacgtggaggccgtggcgtataccgtagtgtcaactgtagaccacttcgttaacgccatagaggagcgcggcttcccgcccaccgccggccagcctcctgccaccacaaagccgaaggagatcaccccagttaatcctgggacgtctcccctcattcggtacgccgcgtggacaggaggcttggccgcggtggtgctcctctgtctggttatatttttgatctgcaccgccaagcggatgcgggtcaaggcatacagggtggacaagtcaccctacaaccagtccatgtactacgccgggctccctgttgatgactttgaggactccgaatctaccgacactgaggaggagttcgggaatgccatcggcgggagccacggcggcagtagttatactgtctacatcgataagacacgg

SEQ ID NO: 124 - DNA, 1869 bp, synthetic construct
  source 1..1869: mol_type = other DNA
atggggacggtgaataagccggtggtaggcgtgctcatgggcttcggtatcattaccgggaccctgcgcatcactaatcctgtgcgggccagcgtgctgcgttacgatgacttccacatcgacgaggataagctggacacaaatagcgtctatgagccgtactaccacagtgatcatgccgaatcctcctgggtgaataggggagagtcatctcgtaaggcgtacgaccataactctccctacatctggccccggaatgactatgacgggttcctggagaacgcccatgagcaccatggagtgtataaccaggggcgcggcatagattccggggagaggctgatgcagcctacacaaatgtcagcccaggaggatttgggagatgacactgggattcacgtgatccctaccctcaatggcgacgatcggcataagatcgtcaacgtcgaccagcgccaatatggcgacgtttttaagggggacttgaaccccaagcctcaggggcagcgcctgattgaggtgagcgtggaggagaaccatcctttcacgctgcgggcccccatccagcggatctacggggtacggtacactgagacttggagttttctgccaagtctcacctgcacaggcgacgccgcacctgccattcagcacatatgcctgaagcacaccacgtgctttcaggatgtggtggtggacgtcgattgtgcagagaataccaaggaggatcagctcgccgagatttcttaccgcttccagggtaagaaagaggctgatcaaccttggatcgtggtcaacacgagtaccctgtttgacgagttggagcttgatccacccgagatcgagccgggggtgttgaaggtgctccgcacggagaagcagtacttgggcgtgtacatctggaacatgagggggtccgacgggacctctacttatgcaacttttctcgtcacctggaagggtgacgagaaaacgcggaatcccacgcccgcggtgaccccccaaccccggggggcggagttccacatgtggaactaccactcacatgtgttctcggtgggggataccttttctctggccatgcacctccagtacaagatccacgaggcaccctttgatctgctgctggagtggctgtacgtccccattgaccccacttgtcagcctatgaggctgtacagtacatgtctgtatcaccccaacgccccccagtgcctgagccacatgaactcgggctgtacatttacaagcccgcacctggcccagagggtggcctcgacagtgtaccaaaactgcgagcacgcagacaactacactgcgtactgccttgggatctcccacatggagcccagtttcgggctcattcttcacgatggaggaaccaccctcaaattcgtggacacccctgagagcttgtccggtctctacgtgttcgttgtgtacttcaacggacacgtggaggccgtggcgtacacagtggtctctacagtggaccattttgtgaacgccatagaggagcgtggttttccacccaccgccggccagcctcctgccaccacgaagccgaaggagatcacccctgtgaatccaggcacatctcctctgatccgctacgctgcgtggacaggaggcttggccgcggtggtgctcctctgcctagtgatctttcttatctgtaccgcaaagcggatgcgggtgaaagcttacagggtagacaagtccccctacaatcagtccatgtattacgccgggctgccagtcgatgacttcgaggattctgaaagcacagacaccgaggaggagttcggcaatgcgattgggggtagccacgggggttccagttatactgtctacatagacaagaccaga

SEQ ID NO: 125 - DNA, 1869 bp, synthetic construct
  source 1..1869: mol_type = other DNA
atgggcaccgtgaacaagcccgtggtcggcgtgctcatgggcttcggtatcattaccggcacgctgaggatcactaaccctgtgcgtgccagcgtcctgcgatatgatgactttcatatcgacgaggacaagctggatacaaacagcgtctatgagccatattaccattccgatcatgccgaatcttcctgggtgaatcggggggagtcaagccgcaaggcatacgaccacaactccccctacatttggccccggaatgactacgacgggttcctggagaatgcccatgaacatcatggggtgtacaaccaggggcgcggcatcgattccggggagaggctgatgcagcctacacaaatgtccgcccaggaggatttgggcgatgataccgggatccacgtgatccccaccctgaatggggacgatcgacacaagatcgtcaacgtggatcagcgccaatacggcgacgtattcaagggggatttgaatcccaaaccgcagggtcagcggctgatcgaggttagcgttgaggagaaccatccttttaccctgcgggcgcccatccagcggatttacggggtgcgatatactgagacttggagtttcctcccaagtctcacctgcacaggcgacgccgccccagccatccagcatatctgcctgaagcatacaacttgcttccaggatgtggtggtggacgtcgactgtgcagaaaacaccaaggaggatcagctcgctgagatctcttaccgcttccaaggtaagaaggaggctgatcagccttggatcgtggtcaacaccagcaccctgtttgatgagctggagctcgatcctcccgagatcgagcccggggtgttgaaggtgctccgcaccgagaaacagtatctgggcgtctatatatggaatatgagggggtccgacgggacgtctacctacgcaacatttctcgtcacctggaagggagatgagaaaacgcgtaatccgactcccgctgtgaccccacagcccagaggggctgagtttcacatgtggaactaccattcacatgttttctcggtgggggacaccttctctctggcaatgcacctccagtacaagatccacgaggccccctttgatctgctgctggaatggctgtacgtgccgatcgacccgacatgtcagccgatgaggctgtactctacatgtctttaccatccaaatgctccccagtgtctgagccacatgaactcgggctgtactttcacaagcccgcatctggctcagagggtggcgagcacagtctaccaaaactgcgaacacgcagataattacacagcgtactgcctcggcatcagccatatggagcccagtttcgggctcattctccacgatggagggaccaccctcaagttcgtggacactccagagagtctctcaggtctctacgtgttcgttgtgtactttaatggacacgtggaggccgtggcgtatacagtggtctctacggtggaccacttcgtgaacgccattgaggagcgggggttcccacctacagccggccagcctccggccaccacgaagccgaaggagattacccctgtgaatccagggacgtctccactgatccgctacgcggcttggaccggaggcttggccgctgttgtgctcctctgccttgtgatctttttgatttgcaccgcgaagcggatgcgggtcaaagcttacagggtggacaagtccccctacaaccagtcgatgtactacgccgggctgccagtcgatgactttgaggactccgagtccacagacactgaggaggagttcggcaacgcgatcggcggtagccacggcgggtctagctatacagtgtacatcgacaagaccaga

SEQ ID NO: 126 - DNA, 1869 bp, synthetic construct
  source 1..1869: mol_type = other DNA
atgggcaccgtcaacaaaccagtggtaggagtgctgatgggattcggcattatcactgggaccctgcgcatcacaaacccggtgcgcgcctctgttctgaggtacgatgacttccacatcgacgaggacaagctcgacactaattctgtgtatgagccatactatcactctgatcatgcagaatcctcctgggtgaataggggggagtctagccggaaggcatatgaccacaattccccctacatctggccccggaacgactacgacgggttcctggagaacgcccatgagcatcatggcgtgtacaaccaggggcgcggcatcgattccggggaacggctgatgcagcctacccagatgtccgcccaggaggacctcggggacgataccggaatccacgttatccccacactgaatggggacgatcgccacaagatcgttaacgtggatcagcgccaatatggcgacgtatttaagggggatctgaaccccaaacctcagggccagcggctaattgaggtgagtgtggaggagaatcaccccttcaccttgagggctcccatccagcgtatctatggggtgcgttacaccgagacttggtcctttctgccaagtctcacctgcacaggcgatgccgcccccgccatccagcatatttgtctgaagcataccacatgcttccaagacgtggtggtggacgtcgactgtgcagaaaacaccaaggaggatcagcttgccgagatttcttaccgcttccagggtaagaaggaagcagatcaaccttggatcgtggtaaacacgagcaccctttttgatgagctggagctggatcctcccgaaatcgaacctggggtgctgaaggtgctccgcactgagaagcaatacctgggggtgtacatctggaatatgagaggttccgatgggacctctacatacgccacttttctcgtcacctggaaaggtgacgagaagacgaggaaccccacccctgctgttactccacagccaaggggtgcggagttccacatgtggaactaccacagtcatgttttctcggtgggggacaccttcagcctggcgatgcacctgcaatacaaaatccatgaggccccctttgatctcctgctggagtggctttatgtacccatagacccgacatgccagcccatgagattgtacagcacttgtctgtatcatccaaacgcacctcagtgcctgagccacatgaattcgggctgcacctttaccagcccgcatctggctcagagggttgcctcaacggtgtatcagaactgtgagcacgcagataattacaccgcgtattgcttgggcatcagccacatggagccgtcattcgggctcattctgcatgacggggggactaccctcaagtttgtggacaccccagaaagcttgagcggcctctacgtgttcgttgtttacttcaacggacatgtggaggctgtggcgtacaccgtagtgtccacggtggaccacttcgtgaacgccattgaggagcgcgggttcccgcccaccgccggccagcctcctgccaccaccaagccgaaagaaatcaccccagtgaatcctgggacgagcccactgattcggtacgctgcgtggacaggaggcctggctgcggtggtgctcctctgtctggtaatatttttgatctgcaccgccaagcggatgcgggtcaaagcatatagggtggacaagagtccctacaaccagtcgatgtattacgccgggctccctgtcgatgactttgaagactccgagtctaccgacacggaggaggagttcggcaacgccatcggcggaagtcatggtggcagttcttacactgtatacatcgacaagacacgg

SEQ ID NO: 127 - DNA, 1869 bp, synthetic construct
  source 1..1869: mol_type = other DNA
atgggtacggttaataagccggtggtcggggtgctgatggggttcgggatcatcaccgggacgctgcgcattacaaatccagtgcgcgcgtccgtcctgcgttacgatgactttcacatcgacgaggacaagctggatacaaacagcgtgtacgagccatattaccactctgatcacgccgagtcctcctgggtgaataggggggaatcgagtcgcaaagcgtacgaccacaattctccctatatctggccccggaacgactatgacgggttcctggagaacgcccatgagcatcatggagtgtataaccaggggcgcggcatagattcgggggagaggctgatgcagccgacccagatgtctgcccaggaggacctgggcgacgacactggcatccacgtgatcccgaccctcaacggggacgatcgtcacaagatcgtcaacgtggaccagcggcagtacggtgacgtgttcaagggggacctcaacccgaagccccaggggcagcggcttattgaggtgtcagtggaggaaaatcatccattcaccctccgagccccaattcagcggatctatggggttcggtacacggagacgtggagttttctgccaagtctgacctgcacgggcgatgccgcccctgcaatccagcatatttgcttgaaacacactacatgctttcaggatgtggtggttgatgtcgactgtgcagagaacactaaggaggatcagcttgccgagatttcttaccgcttccagggcaagaaggaggctgatcagccttggatcgtggtgaacacgtccaccctgtttgatgagctcgagcttgatcctcccgagatcgagcccggggtgctgaaggtgctccgcaccgagaagcagtacctgggggtgtacatctggaacatgcgggggtcggacgggacttctacgtacgcgaccttccttgtgacctggaagggcgacgagaagacccgtaatccgacccccgcagtgacaccccagcctcggggggcggaatttcatatgtggaactatcactcccacgtgttctcggtgggggacaccttcagtcttgcaatgcacctccagtataagatccacgaggctccctttgatctcttgctggagtggctgtatgtgcctattgaccccacatgccagccaatgagactgtattctacgtgtctctatcatcccaacgctcctcaatgcctgtcccatatgaacagtgggtgtacctttacatccccccacctggcccagcgtgttgctagcacggtgtaccagaattgtgaacacgccgataactatacggcgtattgcctgggcattagccacatggagccctccttcggcctgattctgcacgacggaggcacgacgctcaagttcgtggatacccctgagagcttgagcggcctctacgtgttcgtggtgtattttaacggacacgtggaggccgtggcgtacacagtggtcagcacggtcgaccactttgtgaacgccattgaggagcgtgggtttccacccaccgcaggccagccccctgccaccacgaagccaaaggagattaccccagtaaaccctgggactagtcccttgatccgctacgctgcgtggacaggcgggctggccgcggtggtgctgctgtgtctggtcatttttcttatctgcacggctaagcgcatgcgggtgaaggcttaccgggttgacaagtccccctataatcagagcatgtactacgccggtctgccggtcgatgactttgaagatagtgagtccactgacactgaggaggagttcggcaatgccatcggcgggtcacacggcggctcctcgtatactgtctatatcgacaagacccgc

SEQ ID NO: 128 - DNA, 1869 bp, synthetic construct
  source 1..1869: mol_type = other DNA
atggggaccgtgaataagccggtggtaggggtgctcatggggttcggtatcattaccggtactctgcgcattactaaccctgtgcgtgctagtgtcctccggtacgatgacttccacatcgacgaggacaagctggacactaacagcgtatatgagccctactaccactccgatcacgccgagtcctcctgggtgaataggggggagtcatcccgcaaggcctatgaccataactctccctatatctggccccggaatgactatgacggattcctggagaacgcccatgagcatcatggggtgtataaccaggggcgcggaatagactccggggagaggctgatgcagcctacccagatgtccgcccaggaggatcttggcgatgataccggcattcacgtcatccccaccctcaatggcgacgatcgtcacaagatcgtcaatgtggaccagcgccaatatggcgatgttttcaagggggacctcaatcccaagccccaaggacagcggctgattgaggtcagcgtggaggaaaaccatcccttcacccttcgggctcccatccagcggatctacggtgtacgatatactgagacttggtcattcctgccaagtctcacatgcacaggcgacgccgccccagccatccagcacatatgcctgaagcacaccacgtgcttccaggatgtggtggtggacgtggactgtgcagaaaacaccaaggaggatcagctcgccgagatttcttaccgctttcaaggtaagaaggaagctgatcagccttggatcgtggtcaacacgagtacactgtttgacgagctggagctggacccccccgaaatcgagccaggggtgctgaaggtactccgcaccgagaaacagtacctgggagtctacatttggaacatgagggggagcgacgggacgtcgacttacgcaacatttctcgtgacctggaagggtgacgagaagacgcggaatccgactcccgcggtcacccctcagcctcgtggcgcagagttccatatgtggaactaccactcgcatgtgttctcggtgggggataccttcagtctcgctatgcacctccagtacaagatccacgaggcacccttcgatctgctgctggagtggctgtacgtgccgatagacccgacatgtcagcctatgaggctgtattctacatgcctctaccacccaaatgccccacagtgtctgagccacatgaactcgggctgtacttttaccagcccgcatctggctcagagggtggctagcacagtttaccagaactgtgagcacgcagataattacactgcgtactgccttggcatcagccatatggagcccagtttcgggctcatactccacgatggagggaccaccctcaagttcgtggatacacctgagagcttgtccggcctctacgtgttcgttgtatacttcaacggacacgtggaggccgtggcgtacacagtggtctctacagtggaccacttcgtgaacgccattgaagaaagggggttcccccccaccgccggccagcctcctgccaccacgaagcctaaggagatcacccctgtgaacccagggacgtctccacttatccgctacgctgcgtggacaggaggtctggcggcggtggtattgctctgcctcgtgatctttttgatttgcaccgccaagcggatgcgggtcaaggcttatagagtggacaagtctccctacaatcaatccatgtactacgctgggctgccagtggatgactttgaggactccgaatccacagatacggaggaggagttcggcaatgcgatcggcggcagccacggaggttcctcctatactgtctacattgacaagacccgc

SEQ ID NO: 129 - DNA, 1869 bp, synthetic construct
  source 1..1869: mol_type = other DNA
atggggaccgtgaataagcccgtggtaggcgtgctcatgggcttcggtatcatcacaggtactctgcgcattacaaaccctgtacgcgcaagtgtcctacgctacgatgattttcacatcgatgaggacaagttggacaccaactcagtctatgagccgtattaccactccgatcacgccgagtcttcctgggtgaacaggggggagtctagtaggaaggcctacgatcacaactccccctacatctggccccggaatgactacgacgggttcctggagaacgcacatgagcatcatggcgtgtataaccaggggcgcggtattgattccggggagaggctgatgcagcccacgcagatgtctgcccaggaggacctcggcgatgatacgggcattcatgttatccccaccctaaatggcgatgaccgccacaagatcgtgaacgtggatcagcgccaatatggggacgtttttaagggggacttgaaccccaagcctcagggccagcggctgatcgaggtcagtgtggaggaaaaccaccccttcaccctgagggcgcccatccagcgaatttacggggtacgatatactgagacttggagctttctaccctcgctcacctgcacaggcgacgccgcccccgccattcagcatatatgcctgaagcatacaacatgcttccaggatgtggtggtggacgtcgactgtgcagaaaacaccaaggaggatcagctcgccgaaatttcttaccgtttccagggtaagaaggaggctgatcaaccttggatcgtggtaaacacgagtaccctgtttgacgagctggagctcgatcctccagagatcgagcctggggtgttgaaggttctccgcaccgagaagcagtacctgggagtgtatatttggaacatgagggggtcggacgggacctctacttatgccaccttcctcgtcacctggaagggtgacgagaagacccggaacccgaccccagctgtaaccccacagccccggggagcagagttccatatgtggaactaccactcccatgtcttctcggtgggggataccttctctctagctatgcatctccagtacaagatccatgaggctcccttcgatcttctgctggagtggctgtatgtgcccatcgacccgacatgtcagccaatgagactgtactctacatgtctctaccatccaaacgccccacaatgtctgagccacatgaattcgggctgtacttttaccagccctcacctggctcagagggtggcctcaacagtgtatcagaactgcgagcacgcagataattacactgcctactgcctcggcatcagccatatggagccctcatttgggctcatccttcacgatggaggaaccacgctgaagttcgtggacacacctgagagcttgagcggcctctacgtgttcgttgtttacttcaacggacacgtagaggccgtggcgtacactgtggtttccacggtggaccacttcgtcaacgccatcgaggagagaggatttcctcccaccgccggccagcctcctgccacaacgaaaccgaaggagatcacacctgtcaatccaggcacgtctcctttgatccgatacgctgcgtggacaggaggcttggccgcggtggtactgctctgccttgtgatctttctgatctgcaccgccaagcggatgcgggtcaaggcttacagggtagacaagtccccctataatcagtccatgtattacgccgggctgccagtggatgactttgaggactccgaatccactgacacagaggaggagttcggcaacgctatcggcggcagccacggcggatcatcttatactgtctacatagacaagaccaga

SEQ ID NO: 130 - DNA, 1869 bp, synthetic construct
  source 1..1869: mol_type = other DNA
atggggaccgtgaataagcctgtggtgggcgtgctcatgggctttggtataatcaccgggacactgaggattaccaaccctgtgcgagccagcgtcctgaggtacgatgactttcacatcgacgaggacaagctggatactaacagcgtctatgagccgtactaccactccgaccacgccgaatcctcctgggtgaacaggggggagtcaagccgcaaggcatatgaccataactccccctacatctggccccggaatgattacgacggcttcctggagaacgcccatgagcatcatggggtctataaccagggccgcggcatcgattccggggagaggctgatgcagcctacacagatgtccgcccaggaggatttgggcgatgacaccggaattcacgtaatccccactctcaatggtgatgatcgccacaagatcgtcaacgtggaccagcgccaatatggcgacgtgtttaagggggacttgaaccccaagcctcaggggcagcggctgattgaggtgagcgtggaggagaaccatcccttcacgcttcgggcaccgatccagcgcatttatggggtacgatacactgagacctggtcttttctgccaagtctcacctgcacaggagacgccgccccagccattcagcatatatgcctgaagcacacaacctgcttccaggatgtggtggtggacgtcgactgtgcagagaacaccaaggaggatcagcttgccgagatttcttaccgcttccagggtaagaaggaggctgatcagccgtggatcgtcgtgaacacgagtaccctgtttgatgagctggagcttgatcctcctgagatcgagcccggcgtgttgaaggtactccgcaccgagaagcagtacttgggagtgtacatttggaacatgaggggttccgatgggacctctacatatgcgacttttctcgtcacctggaaaggtgacgagaaaacgcggaatcccacccccgctgtcaccccgcagccgcgcggggctgagtttcatatgtggaactatcattcccacgtcttctcggtgggagataccttctcacttgcaatgcatctccagtacaagatccacgaggccccctttgatctgctgctggagtggttgtacgtgcccattgacccaacatgtcagccgatgagactgtactctacatgtctctaccaccctaacgcccctcagtgtctgagccacatgaactcgggctgtacatttaccagcccgcatctggctcagagggtggccagcacagtgtatcagaactgcgaacacgcagacaattacactgcgtactgccttggcatcagccatatggagccctcgtttgggctcatccttcacgatggagggactaccctcaagttcgtggacacccctgagagcttgtccggtctctacgtgtttgttgtttacttcaacggacatgtggaggccgtggcgtacacagtggtatctactgtggaccacttcgtgaacgccattgaggagcgggggtttccccccaccgccggccagccccctgccaccacgaagcccaaggagattacccctgtgaatccagggacgtctccactcatccgctacgctgcgtggacagggggccttgcggcggtggtgctgctttgccttgtgatctttttgatctgcaccgccaagcggatgcgggtcaaagcttatagggtggacaagtccccctataatcagtccatgtattacgccgggctgccagtcgatgattttgaggattccgaatcgacagacaccgaggaggagtttggcaacgccatcggcggcagccacggtgggtcatcctacactgtttacattgacaagacgaga

SEQ ID NO: 131 - DNA, 1869 bp, synthetic construct
  source 1..1869: mol_type = other DNA
atgggcaccgtgaacaagccagtggtgggcgtcctgatgggcttcgggattatcactggcacgttgcgcataacgaaccctgtgcgcgctagcgtcctgcgttacgatgactttcacatcgacgaggataagctcgataccaacagtgtgtatgagccctattaccacagtgatcacgctgaatcctcctgggtgaacaggggggagtccagccggaaggcttatgaccacaattccccctacatctggccccggaatgattatgatgggttcctggagaatgcccatgaacaccatggagtgtataaccaggggcgcgggatcgattccggggaacggctgatgcagccaacccagatgtccgcccaggaagatctcggggacgataccggaatccatgtgatccctaccctgaatggggacgatcgacacaagatcgtcaacgtggatcaacgccaatatggcgatgtatttaagggggatctcaaccccaagccgcagggccagcggctcatcgaggtgagcgtggaggagaatcaccccttcaccttgagggctccgatccagcgcatctatggggtgcgttacactgagacttggtccttcttgccaagtcttacctgcacaggcgatgcagcccctgctattcagcacatttgtctcaagcataccacatgcttccaagacgtcgtggtggatgtcgactgtgcagagaacaccaaggaggatcagcttgccgagataagctaccgctttcagggcaagaaggaggctgatcagccttggatcgtggtgaacacgagcaccctgttcgatgagctggaactggacccccccgagatcgagcccggggtgctgaaggtgctccgcactgagaagcagtacctcggggtgtacatctggaatatgcgggggtccgacgggacctccacatacgccacttttctcgtcacctggaagggtgacgagaagacccggaaccctacaccggccgtgactccacagccccggggtgcagagttccacatgtggaattaccatagccacgtgttctcggtgggggacactttcagcctggcaatgcatctgcaatacaagatccacgaggccccctttgatctgctgctggagtggctgtatgtgccaatagacccaacatgtcagccaatgagactgtactctacatgtctctatcatccaaacgctcctcagtgcctgagccacatgaactcgggctgcacatttactagcccgcatctggcacaaagggtggcctcaacagtgtaccagaactgcgagcacgcagataattacactgcgtattgcttgggcattagccacatggagccctctttcgggctcatcctccatgacgggggcacaacgctcaagttcgtggacacccccgagagcttgagcggcctctacgtgttcgttgtatacttcaacggacacgtagaggccgtggcgtatacggtagtgtctacagtggatcacttcgtgaacgccattgaggagcgcggctttccgcccaccgccggccagccccctgctaccacgaagccgaaagaaataacaccggtgaatccggggacctccccactcatccggtacgccgcgtggacagggggcttggccgcggtggtgctgctctgtctggtgattttcttgatctgcaccgcaaagcggatgcgggttaaggcatatagggtggacaaaagtccctataaccagtcaatgtactacgccgggctccctgttgacgacttcgaggactccgagtccaccgacacggaggaggagttcggaaacgccatcggcgggtcacacgggggctcatcatacactgtatatatcgacaaaacacgg

SEQ ID NO: 132 - DNA, 1869 bp, synthetic construct
  source 1..1869: mol_type = other DNA
atgggcactgtgaataaaccagtggtcggagtgctgatgggcttcggcatcattactggtaccctgcgcataaccaaccctgtgcgcgccagcgtcctgcgttatgatgactttcacatcgacgaggacaagctggacaccaacagtgtctatgagccatattatcattccgatcatgcagaatcttcctgggtgaacaggggggagtctagccggaaggcatacgaccacaactccccctacatctggcccaggaacgactacgacgggttcctggagaacgcccacgaacaccacggggtgtataaccaggggcgtgggatcgattctggcgaacggctgatgcagccgacccagatgtccgcccaggaggacctcggggatgataccggcatccacgtgattccaaccctgaatggggacgatcggcataagatcgtcaacgtggatcaacgccagtatggcgacgtgtttaagggggatctgaaccctaagccacagggccagcggctcatcgaggtgtctgtggaggagaaccacccattcaccttgagagctccgatccagcgtatttatggggtgcgttatactgagacttggtctttcctgccaagtcttacctgcacaggcgatgccgccccagccattcagcatatatgtctgaagcatacgacctgcttccaagacgtggtggtggacgtcgactgtgcagagaataccaaggaggaccagcttgccgagatttcttaccggtttcagggtaagaaggaagctgatcagccttggatcgtggtaaacacgagcaccctgttcgatgagctggagctggaccctcccgagatcgaacccggggtgctgaaggttctccgcaccgagaaacaatacctgggggtgtacatttggaatatgagaggctccgatgggacctctacatacgccacctttctcgtcacctggaaaggtgacgagaagaccaggaacccgactccggctgtgactccacagcccaggggtgcggagttccacatgtggaattatcattcccatgtgttctcggtgggggataccttcagcctggctatgcacctgcagtacaaaatccacgaggcgccctttgatctcctgttggaatggctgtacgtgcctattgacccaacatgtcagcctatgagattgtacagtacatgtctgtatcatcccaacgcgcctcagtgtctgagccacatgaactcgggctgcacttttaccagcccccatctggctcagagggttgcgtcaacagtgtaccaaaactgcgaacacgcagacaactacactgcgtattgcctgggcattagccacatggagcctagtttcgggctcattctgcatgatggggggactacgctcaagttcgtggacaccccagagagcttgagcggcctctacgtgttcgttgtgtatttcaatggacacgtggaggccgtggcgtacacggtagtgtcgacagtggaccactttgtgaacgccatagaggagcgcgggtttccgcccaccgcgggtcagcctcctgcaaccacgaagccaaaggagatcacgccagtgaatccgggcacgagcccactgattcgctacgctgcttggacaggaggcttggccgcggtggtgctcctctgcctggtaatctttttgatctgcaccgccaagcggatgcgggtgaaagcttaccgggtagacaagtccccctacaaccagtcgatgtactacgccgggctccccgttgacgactttgaggactcagagtctaccgacacagaggaggagttcggcaacgccatcggggggtcccacggtggcagcagttacacggtatacatcgacaaaacacgg

SEQ ID NO: 133 - DNA, 1869 bp, synthetic construct
  source 1..1869: mol_type = other DNA
atggggaccgtgaataagcccgtggtgggtgtgctcatgggctttggtattattaccggtactctcaggattaccaatcctgtgcgtgcctcagtcctgcgttacgatgactttcacatcgacgaggacaagctggacacaaacagcgtctatgagccctactaccacagtgatcacgccgaatcctcctgggtgaatcggggggagtccagccgcaaggcttatgaccacaactccccctacatctggccccggaacgactatgacggcttcctggagaacgcccatgagcaccatggcgtgtataaccagggtcgcggtattgattccggggagaggctgatgcagcctacacagatgtccgcccaggaggatttgggtgatgacactggcattcacgtaatccccactctgaatggggacgatcgccataagattgtcaatgtggatcagcgccaatatggtgatgtgtttaagggggatttgaatcctaagcctcaggggcagcggctgattgaggtgtcagtggaggagaatcacccattcaccctccgggcacccatccagcgcatttacggggtgcgatacactgagacttggagtttccttccaagtctcacctgcacaggcgatgccgcccccgccatccagcatatatgcctgaagcacactacatgcttccaggatgtggtggtggacgttgactgtgcagaaaacacaaaggaggatcagctcgccgaaatttcttaccgcttccagggtaagaaggaggctgatcagccttggatcgtggtgaacacgagcaccctgtttgatgagctggagcttgatcctcctgagatcgagcctggggtgctgaaggtgttgcgcaccgagaagcagtacctaggggtctacatttggaatatgagggggtccgacgggacctctacatatgccacttttctggtcacctggaagggagacgagaagacccggaatccaacccccgctgtgacaccacagccacggggggctgagttccacatgtggaactaccattcacacgtgttctcggtgggcgacaccttctctcttgcaatgcatctgcagtataagatccacgaggcccccttcgacctcctgctggagtggctgtacgtgccaatagaccctacatgtcagccgatgagactgtactctacatgtctctaccaccccaacgctccacagtgtctgagccacatgaactcgggctgtacttttactagcccgcatctggcgcagagggtggccagcacggtgtaccagaactgcgagcacgcagataactataccgcttactgcttggggatcagccatatggagccctccttcgggctgatcctccacgatgggggcacaaccctcaaattcgtcgacacccctgagagcttgagcggtctgtatgtgttcgttgtatacttcaacggacacgtggaggccgttgcgtacacagtggtcagcacagtggatcacttcgtgaacgccattgaggagcgtgggtttccacccaccgctggccagcctcctgccaccaccaagccgaaggagatcacccccgtgaacccggggacgtctccactaattcggtatgctgcgtggacaggaggcttggccgcggtggtgctcctctgccttgtgatatttttgatttgtactgccaagcggatgcgggtcaaagcttacagggtggacaagtccccctacaaccagagcatgtattacgccgggctgccagtcgatgactttgaggattccgaatccacagacactgaggaggaattcggcaacgcgatcggtggtagtcacggtgggtcatcttatactgtctacattgacaagaccaga

SEQ ID NO: 134 - DNA, 1869 bp, synthetic construct
  source 1..1869: mol_type = other DNA
atgggaacagtcaataaacccgtagtaggtgtgctgatgggcttcggaatcatcactggtacattgaggatcactaatccagtccgagcttccgttctgcggtatgatgattttcacatcgatgaggacaagctggatacaaactcggtttatgagccgtactatcacagcgatcacgctgagtcatcttgggtgaacaggggagagtcttcccggaaggcttacgaccataactccccgtacatctggccaagaaatgactatgatggctttctggagaacgctcacgaacatcacggtgtgtataaccagggcagaggcatcgattcaggcgagaggctgatgcagccaacgcagatgtctgcgcaggaggacctgggagatgacactggtatacatgtcatccccacccttaacggggatgatcggcacaagatcgttaacgttgatcagcgccaatacggcgacgtgtttaaaggcgatctgaacccgaaaccccaagggcagaggctgatcgaggtgtccgtggaggagaatcatccctttaccttgcgcgcacccatccagaggatctatggtgtcaggtacaccgagacatggtcctttctgccatctctgacctgcaccggagacgctgccccggccatccagcacatctgcctgaagcatacgacatgcttccaggacgtggtcgtggatgtagattgcgccgagaacacgaaggaggaccaactcgctgaaatttcttacagattccagggaaagaaagaagcagatcagccatggatcgtggttaacacctctactctttttgacgagcttgagctcgatcctcctgagatcgagcccggagttctcaaagtgctaaggacagagaaacagtacttgggtgtgtatatttggaacatgcgtggcagcgacggtacatctacctatgccacttttctggtcacatggaagggggatgaaaagacccgaaaccctacccccgctgtgactccacagcctcgcggcgcagagtttcatatgtggaattaccattcacacgtattcagcgtaggagacaccttctcactagcgatgcatctacagtataagatccacgaggctccattcgatctactcctggagtggttgtatgttcccatcgatcctacttgtcagccgatgagactgtattccacatgtctttaccatcctaatgccccgcagtgtctgagccatatgaacagtggctgtactttcacaagtccccatctggcgcagagggtggctagcacagtatatcagaactgtgaacacgctgataactataccgcctattgtcttggtatatcacacatggaaccttccttcgggctgatattgcacgacggaggcactacgttgaaatttgttgacactcccgaaagtcttagtggactctacgtgtttgtggtttatttcaacggacacgtcgaggctgtggcatatacagtggtgtccacggtggatcacttcgtgaatgctatagaggagcgtggcttccctcctacggcggggcagccccctgccaccaccaagcccaaggagatcactcccgtgaaccctggaaccagccctttgattcggtatgctgcatggaccgggggcttagcagctgtcgtgctgttatgcctggttatatttttaatctgtaccgccaagcggatgcgggtgaaagcgtatagggtggacaagagtccttataatcaatcaatgtattacgccgggctccccgttgatgatttcgaggacagcgagagtaccgacaccgaggaggagtttggtaacgccattggcggttcacacggcgggtcttcttatacagtgtatatcgacaaaacccgc

SEQ ID NO: 135 - DNA, 1869 bp, synthetic construct
  source 1..1869: mol_type = other DNA
atgggaacagtcaataaacctgtggtgggcgtgctgatgggcttcggcatcattaccggtacactgcgcattactaacccagtccgagctagtgtgttgagatatgatgattttcacatagatgaggataagctggacacaaactcggtttacgagccttactatcacagcgaccatgctgaatcatcttgggtgaacaggggagagtcttcacggaaggcttatgatcacaactccccttatatttggccaagaaatgattacgacggctttctggagaatgcccacgaacatcacggtgtgtataaccagggccgaggcatcgattcaggagagaggctgatgcagccaacccagatgtctgcacaggaggatctgggagatgacactggaatccatgtgatccctaccctcaacggtgacgaccggcacaagatcgttaacgttgatcagcgtcaatacggggacgtcttcaaaggcgaccttaacccgaagccacaggggcagaggctgatcgaagtatccgtggaggaaaaccatccatttaccttgcgggcaccgattcagagaatctatggagtgaggtacacggaaacttggtcttttctgcctagtctgacctgcaccggggacgctgctcctgccatacagcacatctgtctcaaacatacaacctgcttccaggacgtcgttgtcgatgtagactgcgccgaaaatacaaaggaggatcagctggctgagattagctacaggttccaggggaaaaaagaggctgaccaaccatggatcgtggttaacacttctactctctttgacgaacttgagctcgatcctcctgagatcgagcccggagttctcaaggtgctgcgaacagagaagcagtacttgggggtttatatctggaatatgcgtggcagcgacggtacatccacctacgcaactttcctggtcacatggaagggggacgaaaaaacccggaatcctaccccggctgtgactccacagcctagaggggcagagtttcacatgtggaattaccattctcacgtgttctctgtaggggataccttttcgctagctatgcatctccaatataagattcacgaggccccatttgatcttctgctggagtggttgtacgttccgatcgaccccacgtgtcagccgatgagattgtattctacctgtctttatcatccgaatgctccccagtgtttatctcacatgaactccgggtgtacttttactagtccacatctggcccagagagtggccagtacagtatatcagaactgcgagcatgctgacaattacacagcttactgccttggtatctcacacatggagccttcattcgggctcattctgcacgatggaggcaccacgctgaagtttgttgacactcccgaaagcctttctggcctttacgtgtttgtggtgtatttcaatggacacgtggaggcagtggcatacacagtggtcagcacggttgatcattttgtgaatgccatcgaggagcgtggttttcctcctacggcagggcagcctcctgcaactaccaagccaaaggagattacaccggtcaacccaggaaccagcccattgatccggtatgccgcttggaccggggggttggcagctgtagttctgctttgcctggttatatttttgatttgcaccgcaaagcgaatgcgggttaaagcctacagggtggacaaaagtccttataaccagtcaatgtattatgcgggcctcccggtggatgatttcgaagatagcgagagcaccgatacagaggaggagtttggtaatgcaatagggggttcccacggcggaagctcttatacagtgtatattgacaaaaccagg

SEQ ID NO: 136 - DNA, 1869 bp, synthetic construct
  source 1..1869: mol_type = other DNA
atgggaacagtgaataaacccgtcgtcggagtgcttatgggtttcgggatcatcactggtaccttgaggattaccaaccctgtccgtgcttcggtcttaagatatgatgatttccatattgacgaggataagctggatacgaactcggtttacgagccatactaccacagcgatcacgctgagtcatcctgggttaacaggggtgagtcatcccggaaggcttacgaccataactctccatacatatggcccagaaatgattatgacggctttctggaaaatgcacacgaacatcacggtgtgtataaccagggcagggggatcgatagcggcgaacggctgatgcagcctacccagatgagtgctcaggaggacctgggagatgacaccggtatccatgtcatccctaccctcaacggggacgaccggcacaaaattgtgaacgttgaccagcgccaatacggagatgtattcaaaggcgatctgaaccccaagccacaagggcagaggctgatcgaggtctcggtggaggagaaccatccttttacactgcgtgccccaatccagcggatatatggcgtgcgatacacggagacatggtctttcctgccttcactgacatgcacaggggacgctgccccggccattcagcacatttgtctgaagcatacgacctgcttccaggacgtggtcgtggacgtagattgcgccgaaaacacaaaggaggatcagctggctgaaatcagctacaggtttcaggggaagaaggaagccgaccaaccatggatcgttgttaacacttctacactctttgatgaacttgagctcgaccctcctgagatcgagcccggagtgctcaaagtgctgagaacagagaagcagtatttgggcgtgtatatatggaacatgcgtggcagcgatggaacatccacctacgccacctttctggtgacatggaaaggcgatgaaaagacgcggaaccctactccagctgtgactccacagccacgtggcgctgagtttcacatgtggaactaccattctcatgtgttcagcgtgggggataccttcagtctagcgatgcatctccaatataagattcacgaggccccatttgatctcctcctggagtggttgtatgtgccaatcgatccaacttgtcagccgatgagactgtattccacgtgtctttatcaccccaatgccccacagtgtttatcccacatgaactccggatgtactttcactagtccacatctcgcccagagagtggccagcacagtataccagaattgtgagcatgctgacaactataccgcctactgtcttggtatatcacacatggagccttcattcgggttaatattgcacgatggaggcactacgttgaagtttgttgacactccggagagcctgtctggcctctacgtttttgttgtgtatttcaatggacacgtcgaggccgtggcatacacagtcgtgtcgacggtcgatcattttgtgaatgctatcgaggagcgtggtttccctcctaccgctgggcagcctcctgcaacgaccaagccgaaggagatcacacccgtgaaccccggaaccagcccattgatccggtatgccgcttggaccggggggttggctgccgtggtgctgttgtgcctggttatttttcttatttgtacggcgaaaaggatgcgggtgaaagcctacagagtggacaagagtccctataaccagtcaatgtattacgcgggcttaccagtagatgatttcgaggattcagagagcacggatactgaagaagaattcggtaatgccataggtggttcacacgggggatcttcttatacagtgtatattgacaaaacccga

SEQ ID NO: 137 - DNA, 1869 bp, synthetic construct
  source 1..1869: mol_type = other DNA
atggggacagtcaacaagcccgtggtgggcgtacttatggggttcgggattattactggtacattgaggattactaatccagttcgagcttctgtcctccgctacgatgatttccacattgacgaggacaagctggacactaactcggtctatgagccatactatcacagcgatcacgctgagtcatcttgggtgaacaggggagagtcatcaaggaaggcctatgatcacaactccccgtacatatggccgagaaatgactacgatggctttctggagaatgctcacgaacatcacggtgtgtataaccagggccggggcattgatagcggagaacgcctgatgcagccaacccagatgtctgcgcaggaggatctgggtgatgatacaggtatccatgttatccctacccttaatggggatgacaggcacaaaatcgttaacgttgatcagcgccaatacggtgacgtgtttaaaggcgatctgaatccgaagccccagggacagaggctgatcgaggtgtccgttgaggagaaccacccttttaccttgcgtgcaccgattcagcggatctatggcgtgaggtacacggagacttggtcattcctgcctagcctgacctgcacaggggacgccgcccctgctatccagcacatctgcttgaagcatacgacctgttttcaggacgtggtggtggatgtagactgcgccgagaacacgaaggaggatcagctggccgaaataagctataggttccagggaaagaaggaagctgaccagccatggatcgtggttaacacttctactctctttgatgagcttgagctcgatccaccagagatcgagccaggagtcctcaaggtgctgcgcacagagaagcagtaccttggagtgtatatctggaacatgcgtggcagtgacggtacctccacctacgcaacctttctggtgacctggaagggagacgagaagacccgaaatcctacgccggcagtgaccccacagccccgcggggcagaatttcacatgtggaattatcattctcacgtgttcagcgtgggagacactttcagcctagccatgcacctccaatacaagatccacgaagcccctttcgatctactccttgagtggctgtatgttcctatcgatcctacttgtcagccgatgaggctgtacagtacttgcctataccatcccaatgctccgcagtgtttatctcatatgaactccggatgcacgttcaccagcccacatctcgcccagagagtggctagcacggtataccaaaactgcgagcatgctgacaattacaccgcctactgtcttggtatatcacacatggagccttcattcgggctaatactgcatgacggaggaaccacgttgaaatttgttgacacacccgagagcctgtctggtttgtacgtgtttgtggtctatttcaatggacacgtagaggccgtggcatacacagtggtaagcaccgttgatcactttgttaatgcaatcgaggagcgtggtttccctcctacggctgggcagcctcctgccactacaaagccaaaggagatcacacccgtgaatcccggaaccagcccattgattcggtatgcagcttggaccgggggcctggcagctgtcgtgctgctctgcttggttatttttctgatctgcactgccaagcgcatgcgggttaaagcctacagggtggacaaaagtccttataatcagtcaatgtattatgcgggcctgcctgtagatgatttcgaagacagcgagagcaccgacaccgaggaggagtttggtaatgccataggtggctcacacggcgggtcatcatatacagtgtatatcgataagacccgc

SEQ ID NO: 138 - DNA, 1869 bp, synthetic construct
  source 1..1869: mol_type = other DNA
atggggacagtgaacaaacccgtagtgggcgtacttatggggttcgggatcatcaccggtacattgaggataactaatccggtgcgggcttccgtcctgcgctatgatgattttcacatagacgaggacaagctcgatacaaactcggtttatgagccatactatcacagcgatcatgctgagtcaagctgggtgaataggggagagtctagccggaaggcctacgaccacaactccccgtatatatggcccagaaatgactatgatggctttctggagaatgctcacgaacatcacggtgtttataaccagggccgaggcatcgattccggcgagaggctgatgcagcccacgcagatgtctgcgcaggaagacctaggagatgacactggtatccatgtaatccctaccttgaacggggacgacagacacaaaattgtgaatgttgatcagcgccaatacggtgacgtgttcaagggcgatctgaacccaaagcctcaggggcagaggctgatcgaggtgagcgtcgaggaaaatcacccgtttaccttgcgggcacctattcagcgaatctatggagtaaggtacacggagacatggtcttttctgccttctctgacctgcacaggggatgccgcgccggccatccagcacatctgcctcaagcataccacatgcttccaggacgtggtcgtggatgtggattgtgccgagaacaccaaggaggaccagctggctgaaataagttacaggttccagggaaaaaaggaagctgatcaaccatggatagtggtgaatacttctaccctctttgacgaacttgagctggatccacctgagatcgagcccggagtgctcaaggtgctgcgcacagagaagcagtacctgggggtgtatatctggaacatgcgtggctctgacggtacttcgacttacgctactttcctggtgacatggaaaggggacgaaaagacaagaaatcccaccccggctgtgactccacagcctcggggtgcggagttccatatgtggaattaccattcacatgtgtttagcgtgggcgatacctttagcctagccatgcacctccagtacaagattcacgaggccccattcgatttgctcctggaatggttgtatgttcctatcgaccctacttgtcagccgatgagactgtatagtacatgtctttaccatcctaatgctcctcagtgtttatctcacatgaactccggatgtacatttactagtccacatctcgcccagagagtggctagcacagtataccagaactgcgagcatgctgacaactataccgcctactgccttggtatatcacacatggagcctagcttcgggctcatcctgcatgacggcggcactacgttgaaatttgtcgacactcccgaaagcctgtctggcctctacgtttttgttgtctatttcaacggccatgtcgaggcagtggcatacactgtggtttcgactgtggatcactttgtgaatgccattgaggagcgtggtttccctcctaccgcggggcagcccccggctactaccaagccaaaggagatcacacccgtgaacccgggaaccagccccttgatccggtatgccgcatggaccggcggcttggcagcggtcgtgctgctatgcctggttatatttttaatttgcaccgccaagcgaatgcgggttaaggcctacagggtggacaagagtccctataaccagtcaatgtactatgctggcctcccagtggacgatttcgaggacagcgagagcaccgacacggaggaggagtttggcaatgctatcggaggatcacatggcgggtctagttatacagtttatatcgacaaaacccgc

SEQ ID NO: 139 - DNA, 1869 bp, synthetic construct
  source 1..1869: mol_type = other DNA
atgggaactgtgaacaaaccagtggtcggcgtgcttatggggttcggaatcatcacaggcactttgcggattactaacccagttagagcttccgtcctgagatacgatgactttcatatagatgaggacaaactggacacaaattcggtttacgagccctactatcacagcgatcacgctgagtcatcttgggtgaatcgcggtgagtcttccaggaaggcttatgaccacaactccccgtacatctggccaagaaacgattacgacgggtttctggagaacgctcacgaacatcacggtgtgtataaccagggccgaggcatcgatagcggagagaggctgatgcagccaacgcagatgtctgcgcaggaggaccttggggatgacactggtatccacgtcatcccaaccctgaacggggacgatcggcacaaaatcgttaacgttgatcagcgccaatatggtgacgtgttcaagggagacctgaatccgaagccacaagggcagagactgatcgaggtttccgtcgaggaaaatcacccatttaccttgcgggctccgattcagcgaatctatggggttcgatatacggagacatggtcatttctgccctcacttacttgcaccggggacgccgctcctgctatacagcacatttgtctgaagcacaccacgtgcttccaggacgtggttgtggatgtagactgtgccgagaatacaaaggaagatcagctggctgaaataagctacaggtttcaaggaaagaaggaggccgatcaaccatggatcgtggtgaacacttctactctgtttgacgagcttgagctcgatccgcctgagatcgagcccggggttttgaaggtgctgcgcacagagaagcagtacctgggagtttatatctggaacatgcgtggcagcgacgggacatctacctatgctactttcttggtgacatggaagggggacgaaaaaacccgaaatcctacccctgcagtgactcctcagcctcggggggcagagtttcacatgtggaattaccattctcatgtctttagcgtaggagatacgttcagcctagccatgcatctccagtataaaattcacgaggccccattcgatctgctcctggaatggctgtatgtgccaatcgatcctacttgtcagccgatgagactgtatagtacatgtctttaccatcccaatgctccacagtgcttgagccacatgaattccggatgtactttcactagccctcacctcgctcagagagtggccagcacagtataccagaattgcgagcatgctgacaactatacagcctactgtcttggtatatcacacatggagccatctttcgggctcatactgcatgacggaggcactacgttgaaatttgttgacactcccgaaagcctgtctggcctctacgtttttgtggtttatttcaatggacacgtcgaagcagtggcctacacggtggtcagcaccgttgaccactttgtgaatgcgatcgaggagcgtggtttcccgcccacggcggggcagccccctgccacaaccaagcccaaggagatcacacctgtgaaccccggaacctcacccttgatccgttatgccgcgtggaccggaggcttggctgccgtggtgctgctttgcctggttatatttttaatctgcaccgccaaacggatgcgggttaaagcctacagggtggacaaaagtccctataatcagtcaatgtactatgctggcttgcctgtggatgattttgaagacagcgaaagcaccgacaccgaggaagaatttggtaatgccattggtggttctcacggtgggagctcatatacagtgtatatcgataaaacccgc

SEQ ID NO: 140 - DNA, 1869 bp, synthetic construct
  source 1..1869: mol_type = other DNA
atgggcacagtgaataaacccgtggtgggcgtacttatggggttcggaatcataacaggtacattgaggatcactaatccagtccgcgcttctgtgttaagatatgacgattttcatatcgacgaggacaagctggatacaaactcggtttacgagccgtactaccacagcgatcacgctgaatcttcttgggtcaataggggagagtcttcccggaaggcttacgaccacaattccccttacatatggccaagaaatgattatgatggctttctggagaacgcccacgagcatcacggtgtgtataaccagggacgaggtatcgattccggcgaaagactgatgcagcctacccagatgtctgctcaggaggacctgggagatgacactggtatccatgtcatcccaaccctgaacggggacgatcggcacaaaatcgttaatgttgatcagcgtcagtacggcgacgtgttcaaaggcgatctgaatcccaaaccacaagggcagaggctaatcgaggtgtcagtggaggaaaatcatccttttaccttgagagcaccgattcagcggatctatggagtaaggtatactgaaacatggtcttttctgcctagcctgacttgtaccggggacgcagccccggctatacagcatatctgtcttaagcatacgacctgcttccaggacgtggtcgtggatgtagactgcgccgagaatacaaaggaagatcagctggctgagatcagctataggttccaaggaaagaaggaggcagaccaaccctggatcgtggttaacacttctactctctttgacgagcttgagcttgacccaccggagatcgagcccggagtcctcaaagtgctccgcacagagaagcagtacttgggggtgtatatctggaatatgcgtggcagcgacggtacgtccacctacgctacttttctggtgacatggaagggggatgaaaaaacccgaaaccctacccctgctgtgactccacagcctagaggggcagagtttcacatgtggaattaccattcccatgtgtttagcgtgggcgataccttcagcttggcgatgcatctgcagtacaaaattcacgaggcccccttcgatctccttctggagtggttgtatgtcccgatcgatcctacttgtcagccgatgagactgtacagtacatgtctttaccatcctaacgctccccagtgtttatctcatatgaactcaggatgtactttcacttctccacatctcgcccagagagtggcgagcacagtataccagaactgcgagcatgctgacaactatacagcatactgccttggtatatcacacatggagccttcattcgggcttatactgcatgacggaggcactacgttgaagtttgttgatactccggagagcctgtctggcctgtatgtttttgttgtgtacttcaatgggcacgtggaggccgtggcatacacagtggtcagcacggtcgatcactttgtgaatgccatcgaggagcgcgggttccctcctacggcggggcagccgcctgctaccaccaagcccaaggagatcacacccgtgaatcccggaaccagccccttgatccggtatgccgcttggaccggtggattggcagctgtcgtgttgctttgcctggttattttcttaatctgcaccgctaagcgcatgcgggttaaagcctatagggtggacaaaagtccctataaccagagcatgtactatgccggcctccctgttgatgatttcgaagatagcgagtctacggacaccgaagaagaatttgggaacgccataggaggttcccacggcggatcttcttatacggtgtacatcgataagacccgc

SEQ ID NO: 141 - DNA, 1869 bp, synthetic construct
  source 1..1869: mol_type = other DNA
atgggaactgtcaataagcctgtggtgggcgtgcttatgggcttcgggatcatcaccggtactttgaggattactaatccagtccgagcttccgtgctgagatatgatgatttccatatagatgaggacaagctggatacaaattcggtctacgagccatactatcacagcgaccacgctgagtcatcctgggtgaacaggggagagtcgagtcggaaggcttatgaccataactccccatacatttggcctcggaatgattacgatggctttctggagaatgcccacgaacatcacggtgtgtataaccagggcaggggcatcgatagcggcgaaaggctgatgcagcccacccaaatgtcagcgcaggaggatctgggagatgacactggtatccatgtcatccctacactgaacggggacgatcgacacaaaatcgttaacgtcgatcagcgccaatacggggacgtcttcaaaggcgatctgaacccgaagcctcaagggcaaaggctgatcgaggtgtccgttgaggagaatcacccattcaccttgcgggccccgattcaacggatctacggagtgaggtataccgaaacttggtcttttctcccttcactgacctgtaccggggacgctgcaccggccattcagcacatctgtctgaagcatacgacctgcttccaggacgtggtcgtggacgtagactgtgccgagaacacgaaggaggaccagctggctgagataagctacaggttccagggaaagaaagaggctgaccagccgtggatcgtggtcaatacttctactctctttgatgagcttgagttggatcctcctgagattgagcctggagttctcaaggtgctgcggacagaaaagcagtaccttggggtgtatatctggaacatgcggggctctgacggtacatccacctatgctacctttctggtaacttggaaaggggatgaaaaaactcgaaaccctacgcctgctgtgactccacagcctcgtggggcagagtttcacatgtggaattatcattctcacgtgttcagcgtaggtgataccttcagcctggcaatgcatcttcagtataagattcacgaggcacctttcgatttgctcctggagtggttgtatgtccctatcgatcctacttgtcagccgatgagactgtatagtacatgtctttaccatcccaatgctccccagtgcttgtcacacatgaacagcggatgtactttcacatctccacatctagcccagcgagtggcaagtacagtataccagaactgtgagcatgctgacaactacaccgcctactgtcttggtatatcacacatggagccttcattcgggctcatactgcacgacggaggcactacgctgaaatttgtggacactcctgaaagcctgtctggtctctatgtttttgttgtgtatttcaacggccacgtggaggccgtggcatacacagtggtcagcaccgtggatcactttgttaatgcaatcgaggagcgtggttttcctcctacggcggggcagccacctgccacgaccaagcccaaggagatcacacccgtgaacccgggaaccagccccttgatccggtatgccgcttggaccgggggtttggcagccgtcgtgctgctctgtctggttatatttttaatctgcaccgccaagcgaatgcgggttaaagcctatagggtggacaagagtccctataaccaatcaatgtattatgcaggtcttcctgtagatgatttcgaagactctgagagtaccgacaccgaggaggagttcggaaatgccataggaggctcacacggggggtcctcttacacagtttacatcgacaagacaaga

SEQ ID NO: 142 - DNA, 1869 bp, synthetic construct
  source 1..1869: mol_type = other DNA
atggggaccgtcaacaagcccgtcgtgggcgtgcttatggggttcgggatcatcaccggtacactccgcattactaatccagtacgagcttcagtcctgcgttatgatgatttccacattgatgaggacaagctggacacaaacagcgtttatgagccatattaccacagcgatcacgctgagtcatcttgggtcaataggggcgagtctagccggaaggcatacgaccataacagtccttacatttggccgcggaatgattatgatggatttctggagaatgctcacgaacatcacggtgtgtataatcagggtcgaggcattgatagcggggaaaggctgatgcaaccaacgcagatgtctgcgcaggaggacctgggcgatgatactggcatacatgtcatccccactctgaatggggacgacagacacaaaattgttaacgttgatcagcgccaatacggtgacgtgtttaagggcgatctgaaccctaagccacaaggccagaggctgatcgaggtgtctgtagaggaaaatcacccgtttaccctgcgggcacctattcagcggatctacggagtgaggtatacggaaacatggtcttttctgccttctctgacctgcaccggggacgctgccccggctatacagcacatctgtctgaagcatacaacctgcttccaggacgtggtcgtggatgtcgattgcgccgagaacacaaaggaggatcagctggctgaaataagctacaggttccagggcaagaaggaggctgaccagccatggattgtggtgaacacatccactctgttcgacgagcttgagctagatccacctgagatcgagcccggagttctcaaggtgctgcggaccgagaagcagtatcttggggtgtatatctggaacatgcgtggctctgatggcacaagcacgtacgctacgtttcttgtgacatggaagggggacgaaaagacccggaatccgacccctgctgtgactccccagcctcgtggcgcagagttccacatgtggaattatcatagccatgtgttcagcgtgggagataccttcagcctagccatgcatctccaatacaagattcacgaggccccattcgatctactcctggaatggttgtatgttcctatcgatcctacttgtcagccgatgagactgtacagtacctgtctgtaccatcccaatgctccccagtgtttaagtcatatgaactctggatgtactttcactagtccacatctcgcacagagagtggccagcacagtatatcagaactgcgagcatgctgacaactataccgcctactgtctgggtataagccacatggagccttcattcgggctcatacttcatgacggagggactacattgaagtttgttgacactccagagagcctgagtggcttatacgtgtttgttgtgtattttaatgggcacgttgaggccgtggcttacacagtggtcagcacggtcgatcactttgtcaatgccatcgaggaacgtggtttcccccctacggcggggcaaccacccgctacgaccaagcccaaggagatcacacccgtgaaccccggaacaagccctttgatccgctatgccgcctggacggggggcttggcagccgttgttctgctttgcctggttatattcttaatttgcaccgccaaacgcatgcgagttaaagcttacagagtggacaagagtccatataaccagagtatgtattatgcgggcctcccggtagatgatttcgaggatagcgagtctaccgatacggaggaggagtttggtaatgctataggcgggtcacacggcgggtcttcttatacagtgtatatagacaagactcgc

SEQ ID NO: 143 - DNA, 1869 bp, synthetic construct
  source 1..1869: mol_type = other DNA
atgggcacagtcaataaacctgtggtgggcgtgctcatgggcttcggaatcatcaccgggacattaaggattaccaatcctgtccgagcctccgttctgcgctatgatgactttcacatagatgaggacaagctggacaccaactcggtttacgagccatactatcatagcgatcatgccgagtcctcttgggtgaacaggggagagtcttcccggaaagcttatgaccacaatagcccgtacatttggccgcgaaatgactatgatggctttctggagaatgctcatgaacatcacggtgtgtataatcagggacgaggcatagatagcggcgaaaggctcatgcagccaacacagatgtctgcgcaggaggacctgggagatgacactgggatccatgtcatccctaccctgaacggggacgaccggcataaaatcgttaacgttgatcagcgccaatacggtgacgtgttcaagggcgatctgaatccgaagccccaggggcagaggctgattgaggtgtcggtggaggaaaatcatcccttcacattgcgcgcacccatacagcggatttacggagtgaggtatacggagacatggtcttttctgccctctctgacctgcaccggggacgccgccccggctatccagcacatctgtctgaagcacactacctgcttccaggacgtggtcgtggatgtggactgcgccgagaacacaaaggaggaccagctggctgagataagctataggttccaaggaaagaaggaagctgaccaaccttggatcgtggtgaacacttctactctctttgatgagctcgagctggacccacctgagatcgagcccggagttctcaaggtcctgcgcacagaaaagcagtatttgggggtgtatatctggaacatgcgcggcagtgacgggacatccacatacgctacttttctggtcacctggaagggggatgaaaaaacccgaaatcctaccccagcagtgactccacagcctcgtggcgcagagtttcacatgtggaattatcattcccatgtgttcagcgtgggggatacattcagcctggcgatgcacctccaatacaaaatccacgaggccccatttgatctactcctggagtggttgtatgtgcctatcgaccccacatgtcagccgatgagactgtattcaacatgtctttaccatccaaatgctccacagtgtttatcccatatgaactcagggtgtacttttaccagtccccatctcgctcagcgggtggccagtacggtataccagaactgcgagcatgctgacaactatacagcctactgtcttggtatctcacatatggagccttcattcgggctgatcctgcacgacggaggcaccacgttgaagtttgttgacactcccgagagcctctcaggtctgtatgtgtttgtggtatatttcaatggacacgttgaagccgtggcatacacagtagtgtctacggtcgatcactttgtgaacgctatcgaggagcgtggtttccctcctacggcgggccagcctccagccacaaccaagcctaaggagatcacacccgtgaaccccggaactagccccttgatacggtatgccgcttggaccgggggtctggcggctgtggtgctgttatgtctggttatatttttgatctgcaccgctaagcggatgcgggtgaaggcctatagggtagacaaaagtccatataaccagtcaatgtattatgccggcctcccggtagatgattttgaggacagcgagagcaccgacaccgaggaggagttcggtaacgctatagggggctctcatggcgggagttcatatacagtgtatatcgacaagactcgc

SEQ ID NO: 144 - DNA, 1869 bp, synthetic construct
  source 1..1869: mol_type = other DNA
atgggaacggtcaacaagcccgtggtgggggtgcttatggggttcgggatcatcaccggtacactgaggattactaatccagtccgagcttcagtcctgaggtacgatgattttcacattgacgaggacaaactggacacaaatagcgtgtacgaaccttactatcacagcgaccacgctgagtcatcatgggttaacaggggagagagtagccggaaggcttatgaccataactccccctacatttggcccagaaatgactatgacggctttctggagaacgctcacgaacatcatggtgtgtataatcaggggcgagggatcgattcgggcgaaaggctgatgcagccaacacagatgtctgcgcaggaggacctgggcgatgatacaggtatccatgtcatcccaaccctgaacggggacgaccggcacaaaatcgttaacgtcgatcagcgccaatatggtgacgtgttcaagggcgatctgaatccgaaaccacaggggcagaggctgatcgaggtatccgttgaggaaaatcaccctttcaccctgcgggcaccgattcagcggatctatggagtgaggtacacagagacttggtcctttctgccatctctgacctgtaccggggacgctgcccccgctatccaacacatctgcctgaagcacacgacctgcttccaggacgtggtcgtggatgtagattgcgccgagaacacaaaggaggatcagctcgctgagatcagctacaggttccagggaaagaaggaagctgaccagccatggatcgtggttaacacttctactctctttgatgaacttgagctagaccctcctgagatcgagcccggagttctcaaggtgctccgcacagagaagcagtacctgggggtgtatatctggaatatgcgtggaagcgatggtacctccacatacgctacttttctggttacctggaagggtgacgaaaagacccgaaatcctacccctgcggtgactccacagccccgcggggcagagtttcacatgtggaattatcattctcatgtgttcagcgtaggggataccttctctctagccatgcatctccaatacaagattcacgaggcccctttcgatctactcctggagtggttgtatgtaccaatcgatcctacttgtcagccgatgagactgtattcgacatgtctctaccaccctaatgctcctcagtgtttaagccacatgaattccggatgtacgtttactagtccacatctggcccagagagtggccagtaccgtataccagaattgcgagcatgctgacaactacaccgcctactgtttagggatatcccacatggaaccttctttcgggctgattttgcatgacggaggcactactttgaagtttgttgacactcccgaaagcctgtcgggcctatacgtttttgtggtttacttcaatggacatgtcgaggcggtggcttacacggttgtgtctacggtagatcattttgtgaatgcaatcgaggagcgtggttttcctcctacggcggggcagccccctgccaccacaaagccaaaggagatcacacccgtgaacccgggaaccagccccttgatccggtatgcagcttggaccgggggcttggcagctgtcgtcctgctttgtctggtcatatttttaatctgcaccgccaagcggatgcgggttaaagcataccgagtagataagtccccctacaaccagtccatgtactatgcggggctgcctgtggatgattttgaagactccgagagcacggacaccgaggaggagtttggaaacgccataggaggatcacatggagggtcttcttatactgtttatatcgacaaaacccgc

SEQ ID NO: 145 - DNA, 1869 bp, synthetic construct
  source 1..1869: mol_type = other DNA
atgggtaccgttaataaacccgtggtgggagtgcttatgggttttgggatcatcactggtacattgaggattactaatccagtgcgagctagtgtcctgagatacgatgatttccacattgatgaggataagctggatacaaactcggtttatgagccatactatcacagcgatcacgctgagtcatcttgggtgaacaggggagagtctagccggaaggcttacgaccataactccccgtatatatggccccgaaatgattatgatgggtttctggaaaacgctcacgaacatcacggtgtgtataaccagggccgcggcatcgatagcggtgaaaggctgatgcagcctacccagatgagtgcgcaggaggacctgggagatgacactggtatccacgtcattcctaccctgaacggggacgatcggcataaaatcgtcaacgttgatcagcgccaatacggtgacgtgttcaagggcgatctgaaccctaaaccacaagggcagaggctgatcgaagtgtccgttgaggagaatcacccgtttaccttgcgggcaccgattcagcggatctacggagtcaggtatacggagacttggtctttcctgccttctctgacctgcaccggggacgccgccccggctatacagcacatctgtctgaagcatactacctgtttccaggacgtggtcgtcgatgtagattgcgccgagaacactaaggaggatcagctggcagagataagctacaggttccagggaaagaaggaagctgaccagccatggatcgtggttaacacttctactctctttgacgagcttgagctggatcctcctgagatcgagcccggagtgctcaaggtgttgcgcacagagaagcagtacctgggggtgtatatctggaatatgcgtggctctgacggtacaagtacctacgctactttcctggtgacatggaagggggacgagaaaacccgaaaccctacccccgctgtcactccacagcctcgtggggcagagtttcacatgtggaattatcattctcatgtctttagcgtaggagacacctttagcctagcgatgcatctccagtacaagattcacgaggccccattcgatctactcctggaatggctttatgttcctatcgatcctacttgtcagccgatgagactgtattctacatgtctgtaccatcccaatgctccccagtgtttatctcacatgaactccggttgtacttttactagtccacatctcgcccagagagtggccagcacagtataccagaactgcgagcacgccgacaactatacggcctattgtctgggtatatcacacatggagcccagtttcgggctcatcctgcatgacggaggaacaacgctgaagttcgtagatactccggaaagcttatctggcctctacgttttcgtggtatatttcaatggacacgtcgaggccgtagcatataccgtggtgagcaccgttgaccacttcgtgaatgcgatcgaggagcgtggattccctcctacggcggggcagcctcctgccacgaccaagcccaaggaaatcacacccgtgaaccccgggaccagccccttgattcggtatgctgcttggaccggcggcctcgcagctgtggtgctgctttgtctggttatcttcttgatctgcaccgccaaacgcatgcgggttaaagcctacagggtggataaaagtccttataaccagtcaatgtactacgccggactcccggtagatgatttcgaagacagcgagagcaccgataccgaggaggagttcggtaacgccatcggaggtagccacggcgggtcttcttatacagtgtatatagacaagacccgc

SEQ ID NO: 146 - RNA, 1869 nt, Varicella zoster virus
  source 1..1869: mol_type = genomic RNA
atggggacagttaataaacctgtggtgggggtattgatggggttcggaattatcacgggaacgttgcgtataacgaatccggtcagagcatccgtcttgcgatacgatgattttcacatcgatgaagacaaactggatacaaactccgtatatgagccttactaccattcagatcatgcggagtcttcatgggtaaatcggggagagtcttcgcgaaaagcgtacgatcataactcaccttatatatggccacgtaatgattatgatggatttttagagaacgcacacgaacaccatggggtgtataatcagggccgtggtatcgatagcggggaacggttaatgcaacccacacaaatgtctgcacaggaggatcttggggacgatacgggcatccacgttatccctacgttaaacggcgatgacagacataaaattgtaaatgtggaccaacgtcaatacggtgacgtgtttaaaggagatcttaatccaaaaccccaaggccaaagactcattgaggtgtcagtggaagaaaatcacccgtttactttacgcgcaccgattcagcggatttatggagtccggtacaccgagacttggagctttttgccgtcattaacctgtacgggagacgcagcgcccgccatccagcatatatgcttaaaacatacaacatgctttcaagacgtggtggtggatgtggattgcgcggaaaatactaaagaggatcagttggccgaaatcagttaccgttttcaaggtaagaaggaagcggaccaaccgtggattgttgtaaacacgagcacactgtttgatgaactcgaattagacccccccgagattgaaccgggtgtcttgaaagtacttcggacagaaaaacaatacttgggtgtgtacatttggaacatgcgcggctccgatggtacgtctacctacgccacgtttttggtcacctggaaaggggatgaaaaaacaagaaaccctacgcccgcagtaactcctcaaccaagaggggctgagtttcatatgtggaattaccactcgcatgtattttcagttggtgatacgtttagcttggcaatgcatcttcagtataagatacatgaagcgccatttgatttgctgttagagtggttgtatgtccccatcgatcctacatgtcaaccaatgcggttatattctacgtgtttgtatcatcccaacgcaccccaatgcctctctcatatgaattccggttgtacatttacctcgccacatttagcccagcgtgttgcaagcacagtgtatcaaaattgtgaacatgcagataactacaccgcatattgtctgggaatatctcatatggagcctagctttggtctaatcttacacgacgggggcaccacgttaaagtttgtagatacacccgagagtttgtcgggattatacgtttttgtggtgtattttaacgggcatgttgaagccgtagcatacactgttgtatccacagtagatcattttgtaaacgcaattgaagagcgtggatttccgccaacggccggtcagccaccggcgactactaaacccaaggaaattacccccgtaaaccccggaacgtcaccacttatacgatatgccgcatggaccggagggcttgcagcagtagtacttttatgtctcgtaatatttttaatctgtacggctaaacgaatgagggttaaagcctatagggtagacaagtccccgtataaccaaagcatgtattacgctggccttccagtggacgatttcgaggactcggaatctacggatacggaagaagagtttggtaacgcgattggagggagtcacgggggttcgagttacacggtgtatatagataagacccgg

SEQ ID NO: 147 - RNA, 1869 nt, synthetic construct
  source 1..1869: mol_type = other RNA
atgggcaccgtgaacaagcctgttgtgggcgtgctgatgggcttcggcatcatcacaggcaccctgcggatcaccaatcctgtgcgggctagcgtgctgagatacgacgacttccacatcgacgaggacaagctggacaccaacagcgtgtacgagccctactaccacagcgatcacgccgagtctagctgggtcaacagaggcgagagcagcagaaaggcctacgaccacaacagcccctacatctggccccggaacgactacgatggcttcctggaaaatgcccacgagcaccacggcgtgtacaatcaaggcagaggcatcgacagcggcgagagactgatgcagcctacacagatgagcgcccaagaggacctgggagatgataccggcatccacgtgatccccacactgaacggcgacgacagacacaagatcgtgaacgtggaccagcggcagtacggcgacgtgttcaagggcgacctgaatcctaagcctcagggccagcgcctgatcgaggtgtccgtggaggagaatcaccccttcacactgagagcccctatccagagaatctacggcgtgcgctataccgagacatggtcctttctgcccagcctgacatgtaccggggatgccgctcctgccatccagcacatttgcctgaagcacaccacctgtttccaggacgtggtggtggatgtggactgcgccgagaacaccaaagaggatcagctggccgagatcagctaccggttccagggaaagaaagaggccgaccagccttggatcgtggtcaacaccagcacactgttcgacgagctggaactggaccctcctgagattgaacccggggtgctgaaggtgctgagaaccgagaagcagtacctgggagtgtacatctggaacatgagaggcagcgacggcacctctacctacgccacctttctggtcacatggaagggcgacgagaaaacacggaaccccacaccagctgtgacccctcaacctagaggcgccgagtttcacatgtggaattaccacagccacgtgttcagcgtgggcgatacctttagcctggccatgcatctgcagtacaagatccacgaggcccctttcgacctgctgctggaatggctgtacgtgcccatcgatcctacctgccagcctatgcggctgtactccacctgtctgtatcaccccaacgctccccagtgcctgagccacatgaatagcggctgcaccttcacaagccctcacctggctcagcgagtggccagcacagtgtaccagaattgcgagcacgccgacaattacaccgcctactgtctgggcatcagccacatggaacctagcttcggcctgatcctgcacgatggcggcacaaccctgaagttcgtggatacccctgagagcctgagcggcctgtatgtgttcgtggtgtacttcaacggccacgtggaagccgtggcctacaccgtggtgtctaccgtggaccacttcgtgaacgccatcgaggaaagaggcttccctccaactgctggacagcctcctgccaccaccaagcctaaagaaatcacacccgtgaatcccggcacaagcccactgatcagatacgccgcttggacaggcggactggctgctgttgttctgctgtgcctggtcatcttcctgatctgcaccgccaagcggatgagagtgaaggcctacagagtggacaagagcccttacaaccagagcatgtactacgccggcctgcctgtggacgacttcgaggatagcgagagcaccgacaccgaggaggagttcggcaacgccattggaggatctcacggcggcagcagctataccgtgtacatcgacaagacccgg

SEQ ID NO: 148 - RNA, 1869 nt, synthetic construct
  source 1..1869: mol_type = other RNA
atgggcaccgtgaacaagcccgtggtgggcgtgctgatgggcttcggcatcatcaccggcaccctgcgcatcaccaaccccgtgcgcgccagcgtgctgcgctacgacgacttccacatcgacgaggacaagctggacaccaacagcgtgtacgagccctactaccacagcgaccacgccgagagcagctgggtgaaccgcggcgagagcagccgcaaggcctacgaccacaacagcccctacatctggccccgcaacgactacgacggcttcctggagaacgcccacgagcaccacggcgtgtacaaccagggccgcggcatcgacagcggcgagcgcctgatgcagcccacccagatgagcgcccaggaggacctgggcgacgacaccggcatccacgtgatccccaccctgaacggcgacgaccgccacaagatcgtgaacgtggaccagcgccagtacggcgacgtgttcaagggcgacctgaaccccaagccccagggccagcgcctgatcgaggtgagcgtggaggagaaccaccccttcaccctgcgcgcccccatccagcgcatctacggcgtgcgctacaccgagacctggagcttcctgcccagcctgacctgcaccggcgacgccgcccccgccatccagcacatctgcctgaagcacaccacctgcttccaggacgtggtggtggacgtggactgcgccgagaacaccaaggaggaccagctggccgagatcagctaccgcttccagggcaagaaggaggccgaccagccctggatcgtggtgaacaccagcaccctgttcgacgagctggagctggacccccccgagatcgagcccggcgtgctgaaggtgctgcgcaccgagaagcagtacctgggcgtgtacatctggaacatgcgcggcagcgacggcaccagcacctacgccaccttcctggtgacctggaagggcgacgaaaagacccgcaaccccacccccgccgtgaccccccagccccgcggcgccgagttccacatgtggaactaccacagccacgtgttcagcgtgggcgacaccttcagcctggccatgcacctgcagtacaagatccacgaggcccccttcgacctgctgctggagtggctgtacgtgcccatcgaccccacctgccagcccatgcgcctgtacagcacctgcctgtaccaccccaacgccccccagtgcctgagccacatgaacagcggctgcaccttcaccagcccccacctggcccagcgcgtggccagcaccgtgtaccagaactgcgagcacgccgacaactacaccgcctactgcctgggcatcagccacatggagcccagcttcggcctgatcctgcacgacggcggcaccaccctgaagttcgtggacacccccgagagcctgagcggcctgtacgtgttcgtggtgtacttcaacggccacgtggaggccgtggcctacaccgtggtgagcaccgtggaccacttcgtgaacgccatcgaggagcgcggcttcccccccaccgccggccagccccccgccaccaccaagcccaaggagatcacccccgtgaaccccggcaccagccccctgatccgctacgccgcctggaccggcggcctggccgccgtggtgctgctgtgcctggtgatcttcctgatctgcaccgccaagcgcatgcgcgtgaaggcctaccgcgtggacaagagcccctacaaccagagcatgtactacgccggcctgcccgtggacgacttcgaggacagcgagagcaccgacaccgaggaggagttcggcaacgccatcggcggcagccacggcggcagcagctacaccgtgtacatcgacaagacccgc

SEQ ID NO: 149 - RNA, 1638 nt, synthetic construct
  source 1..1638: mol_type = other RNA
atgggcaccgtgaacaagcctgttgtgggcgtgctgatgggcttcggcatcatcacaggcaccctgcggatcaccaatcctgtgcgggctagcgtgctgagatacgacgacttccacatcgacgaggacaagctggacaccaacagcgtgtacgagccctactaccacagcgatcacgccgagtctagctgggtcaacagaggcgagagcagcagaaaggcctacgaccacaacagcccctacatctggccccggaacgactacgatggcttcctggaaaatgcccacgagcaccacggcgtgtacaatcaaggcagaggcatcgacagcggcgagagactgatgcagcctacacagatgagcgcccaagaggacctgggagatgataccggcatccacgtgatccccacactgaacggcgacgacagacacaagatcgtgaacgtggaccagcggcagtacggcgacgtgttcaagggcgacctgaatcctaagcctcagggccagcgcctgatcgaggtgtccgtggaggagaatcaccccttcacactgagagcccctatccagagaatctacggcgtgcgctataccgagacatggtcctttctgcccagcctgacatgtaccggggatgccgctcctgccatccagcacatttgcctgaagcacaccacctgtttccaggacgtggtggtggatgtggactgcgccgagaacaccaaagaggatcagctggccgagatcagctaccggttccagggaaagaaagaggccgaccagccttggatcgtggtcaacaccagcacactgttcgacgagctggaactggaccctcctgagattgaacccggggtgctgaaggtgctgagaaccgagaagcagtacctgggagtgtacatctggaacatgagaggcagcgacggcacctctacctacgccacctttctggtcacatggaagggcgacgagaaaacacggaaccccacaccagctgtgacccctcaacctagaggcgccgagtttcacatgtggaattaccacagccacgtgttcagcgtgggcgatacctttagcctggccatgcatctgcagtacaagatccacgaggcccctttcgacctgctgctggaatggctgtacgtgcccatcgatcctacctgccagcctatgcggctgtactccacctgtctgtatcaccccaacgctccccagtgcctgagccacatgaatagcggctgcaccttcacaagccctcacctggctcagcgagtggccagcacagtgtaccagaattgcgagcacgccgacaattacaccgcctactgtctgggcatcagccacatggaacctagcttcggcctgatcctgcacgatggcggcacaaccctgaagttcgtggatacccctgagagcctgagcggcctgtatgtgttcgtggtgtacttcaacggccacgtggaagccgtggcctacaccgtggtgtctaccgtggaccacttcgtgaacgccatcgaggaaagaggcttccctccaactgctggacagcctcctgccaccaccaagcctaaagaaatcacacccgtgaatcccggcacaagcccactgatcagatacgccgcttggacaggcggactggct

SEQ ID NO: 150 - RNA, 1638 nt, synthetic construct
  source 1..1638: mol_type = other RNA
atgggcaccgtgaacaagcccgtggtgggcgtgctgatgggcttcggcatcatcaccggcaccctgcgcatcaccaaccccgtgcgcgccagcgtgctgcgctacgacgacttccacatcgacgaggacaagctggacaccaacagcgtgtacgagccctactaccacagcgaccacgccgagagcagctgggtgaaccgcggcgagagcagccgcaaggcctacgaccacaacagcccctacatctggccccgcaacgactacgacggcttcctggagaacgcccacgagcaccacggcgtgtacaaccagggccgcggcatcgacagcggcgagcgcctgatgcagcccacccagatgagcgcccaggaggacctgggcgacgacaccggcatccacgtgatccccaccctgaacggcgacgaccgccacaagatcgtgaacgtggaccagcgccagtacggcgacgtgttcaagggcgacctgaaccccaagccccagggccagcgcctgatcgaggtgagcgtggaggagaaccaccccttcaccctgcgcgcccccatccagcgcatctacggcgtgcgctacaccgagacctggagcttcctgcccagcctgacctgcaccggcgacgccgcccccgccatccagcacatctgcctgaagcacaccacctgcttccaggacgtggtggtggacgtggactgcgccgagaacaccaaggaggaccagctggccgagatcagctaccgcttccagggcaagaaggaggccgaccagccctggatcgtggtgaacaccagcaccctgttcgacgagctggagctggacccccccgagatcgagcccggcgtgctgaaggtgctgcgcaccgagaagcagtacctgggcgtgtacatctggaacatgcgcggcagcgacggcaccagcacctacgccaccttcctggtgacctggaagggcgacgaaaagacccgcaaccccacccccgccgtgaccccccagccccgcggcgccgagttccacatgtggaactaccacagccacgtgttcagcgtgggcgacaccttcagcctggccatgcacctgcagtacaagatccacgaggcccccttcgacctgctgctggagtggctgtacgtgcccatcgaccccacctgccagcccatgcgcctgtacagcacctgcctgtaccaccccaacgccccccagtgcctgagccacatgaacagcggctgcaccttcaccagcccccacctggcccagcgcgtggccagcaccgtgtaccagaactgcgagcacgccgacaactacaccgcctactgcctgggcatcagccacatggagcccagcttcggcctgatcctgcacgacggcggcaccaccctgaagttcgtggacacccccgagagcctgagcggcctgtacgtgttcgtggtgtacttcaacggccacgtggaggccgtggcctacaccgtggtgagcaccgtggaccacttcgtgaacgccatcgaggagcgcggcttcccccccaccgccggccagccccccgccaccaccaagcccaaggagatcacccccgtgaaccccggcaccagccccctgatccgctacgccgcctggaccggcggcctggcc

SEQ ID NO: 151 - RNA, 1869 nt, synthetic construct
  source 1..1869: mol_type = other RNA
atgggcaccgtgaacaagcctgttgtgggcgtgctgatgggcttcggcatcatcacaggcaccctgcggatcaccaatcctgtgcgggctagcgtgctgagatacgacgacttccacatcgacgaggacaagctggacaccaacagcgtgtacgagccctactaccacagcgatcacgccgagtctagctgggtcaacagaggcgagagcagcagaaaggcctacgaccacaacagcccctacatctggccccggaacgactacgatggcttcctggaaaatgcccacgagcaccacggcgtgtacaatcaaggcagaggcatcgacagcggcgagagactgatgcagcctacacagatgagcgcccaagaggacctgggagatgataccggcatccacgtgatccccacactgaacggcgacgacagacacaagatcgtgaacgtggaccagcggcagtacggcgacgtgttcaagggcgacctgaatcctaagcctcagggccagcgcctgatcgaggtgtccgtggaggagaatcaccccttcacactgagagcccctatccagagaatctacggcgtgcgctataccgagacatggtcctttctgcccagcctgacatgtaccggggatgccgctcctgccatccagcacatttgcctgaagcacaccacctgtttccaggacgtggtggtggatgtggactgcgccgagaacaccaaagaggatcagctggccgagatcagctaccggttccagggaaagaaagaggccgaccagccttggatcgtggtcaacaccagcacactgttcgacgagctggaactggaccctcctgagattgaacccggggtgctgaaggtgctgagaaccgagaagcagtacctgggagtgtacatctggaacatgagaggcagcgacggcacctctacctacgccacctttctggtcacatggaagggcgacgagaaaacacggaaccccacaccagctgtgacccctcaacctagaggcgccgagtttcacatgtggaattaccacagccacgtgttcagcgtgggcgatacctttagcctggccatgcatctgcagtacaagatccacgaggcccctttcgacctgctgctggaatggctgtacgtgcccatcgatcctacctgccagcctatgcggctgtactccacctgtctgtatcaccccaacgctccccagtgcctgagccacatgaatagcggctgcaccttcacaagccctcacctggctcagcgagtggccagcacagtgtaccagaattgcgagcacgccgacaattacaccgcctactgtctgggcatcagccacatggaacctagcttcggcctgatcctgcacgatggcggcacaaccctgaagttcgtggatacccctgagagcctgagcggcctgtatgtgttcgtggtgtacttcaacggccacgtggaagccgtggcctacaccgtggtgtctaccgtggaccacttcgtgaacgccatcgaggaaagaggcttccctccaactgctggacagcctcctgccaccaccaagcctaaagaaatcacacccgtgaatcccggcacaagcccactgatcagatacgccgcttggacaggcggactggctgctgttgttctgctgtgcctggtcatcttcctgatctgcaccgccaagcggatgagagtgaaggcctacagagtggacaagagcccttacaaccagagcatgtacgccgccggcctgcctgtggacgacttcgaggatagcgagagcaccgacaccgaggaggagttcggcaacgccattggaggatctcacggcggcagcagctataccgtgtacatcgacaagacccgg

SEQ ID NO: 152 - RNA, 1869 nt, synthetic construct
  source 1..1869: mol_type = other RNA
atgggcaccgtgaacaagcccgtggtgggcgtgctgatgggcttcggcatcatcaccggcaccctgcgcatcaccaaccccgtgcgcgccagcgtgctgcgctacgacgacttccacatcgacgaggacaagctggacaccaacagcgtgtacgagccctactaccacagcgaccacgccgagagcagctgggtgaaccgcggcgagagcagccgcaaggcctacgaccacaacagcccctacatctggccccgcaacgactacgacggcttcctggagaacgcccacgagcaccacggcgtgtacaaccagggccgcggcatcgacagcggcgagcgcctgatgcagcccacccagatgagcgcccaggaggacctgggcgacgacaccggcatccacgtgatccccaccctgaacggcgacgaccgccacaagatcgtgaacgtggaccagcgccagtacggcgacgtgttcaagggcgacctgaaccccaagccccagggccagcgcctgatcgaggtgagcgtggaggagaaccaccccttcaccctgcgcgcccccatccagcgcatctacggcgtgcgctacaccgagacctggagcttcctgcccagcctgacctgcaccggcgacgccgcccccgccatccagcacatctgcctgaagcacaccacctgcttccaggacgtggtggtggacgtggactgcgccgagaacaccaaggaggaccagctggccgagatcagctaccgcttccagggcaagaaggaggccgaccagccctggatcgtggtgaacaccagcaccctgttcgacgagctggagctggacccccccgagatcgagcccggcgtgctgaaggtgctgcgcaccgagaagcagtacctgggcgtgtacatctggaacatgcgcggcagcgacggcaccagcacctacgccaccttcctggtgacctggaagggcgacgaaaagacccgcaaccccacccccgccgtgaccccccagccccgcggcgccgagttccacatgtggaactaccacagccacgtgttcagcgtgggcgacaccttcagcctggccatgcacctgcagtacaagatccacgaggcccccttcgacctgctgctggagtggctgtacgtgcccatcgaccccacctgccagcccatgcgcctgtacagcacctgcctgtaccaccccaacgccccccagtgcctgagccacatgaacagcggctgcaccttcaccagcccccacctggcccagcgcgtggccagcaccgtgtaccagaactgcgagcacgccgacaactacaccgcctactgcctgggcatcagccacatggagcccagcttcggcctgatcctgcacgacggcggcaccaccctgaagttcgtggacacccccgagagcctgagcggcctgtacgtgttcgtggtgtacttcaacggccacgtggaggccgtggcctacaccgtggtgagcaccgtggaccacttcgtgaacgccatcgaggagcgcggcttcccccccaccgccggccagccccccgccaccaccaagcccaaggagatcacccccgtgaaccccggcaccagccccctgatccgctacgccgcctggaccggcggcctggccgccgtggtgctgctgtgcctggtgatcttcctgatctgcaccgccaagcgcatgcgcgtgaaggcctaccgcgtggacaagagcccctacaaccagagcatgtacgccgccggcctgcccgtggacgacttcgaggacagcgagagcaccgacaccgaggaggagttcggcaacgccatcggcggcagccacggcggcagcagctacaccgtgtacatcgacaagacccgc

SEQ ID NO: 153 - RNA, 1743 nt, synthetic construct
  source 1..1743: mol_type = other RNA
atgggcaccgtgaacaagcctgttgtgggcgtgctgatgggcttcggcatcatcacaggcaccctgcggatcaccaatcctgtgcgggctagcgtgctgagatacgacgacttccacatcgacgaggacaagctggacaccaacagcgtgtacgagccctactaccacagcgatcacgccgagtctagctgggtcaacagaggcgagagcagcagaaaggcctacgaccacaacagcccctacatctggccccggaacgactacgatggcttcctggaaaatgcccacgagcaccacggcgtgtacaatcaaggcagaggcatcgacagcggcgagagactgatgcagcctacacagatgagcgcccaagaggacctgggagatgataccggcatccacgtgatccccacactgaacggcgacgacagacacaagatcgtgaacgtggaccagcggcagtacggcgacgtgttcaagggcgacctgaatcctaagcctcagggccagcgcctgatcgaggtgtccgtggaggagaatcaccccttcacactgagagcccctatccagagaatctacggcgtgcgctataccgagacatggtcctttctgcccagcctgacatgtaccggggatgccgctcctgccatccagcacatttgcctgaagcacaccacctgtttccaggacgtggtggtggatgtggactgcgccgagaacaccaaagaggatcagctggccgagatcagctaccggttccagggaaagaaagaggccgaccagccttggatcgtggtcaacaccagcacactgttcgacgagctggaactggaccctcctgagattgaacccggggtgctgaaggtgctgagaaccgagaagcagtacctgggagtgtacatctggaacatgagaggcagcgacggcacctctacctacgccacctttctggtcacatggaagggcgacgagaaaacacggaaccccacaccagctgtgacccctcaacctagaggcgccgagtttcacatgtggaattaccacagccacgtgttcagcgtgggcgatacctttagcctggccatgcatctgcagtacaagatccacgaggcccctttcgacctgctgctggaatggctgtacgtgcccatcgatcctacctgccagcctatgcggctgtactccacctgtctgtatcaccccaacgctccccagtgcctgagccacatgaatagcggctgcaccttcacaagccctcacctggctcagcgagtggccagcacagtgtaccagaattgcgagcacgccgacaattacaccgcctactgtctgggcatcagccacatggaacctagcttcggcctgatcctgcacgatggcggcacaaccctgaagttcgtggatacccctgagagcctgagcggcctgtatgtgttcgtggtgtacttcaacggccacgtggaagccgtggcctacaccgtggtgtctaccgtggaccacttcgtgaacgccatcgaggaaagaggcttccctccaactgctggacagcctcctgccaccaccaagcctaaagaaatcacacccgtgaatcccggcacaagcccactgatcagatacgccgcttggacaggcggactggctgctgttgttctgctgtgcctggtcatcttcctgatctgcaccgccaagcggatgagagtgaaggcctacagagtggacaagagcccttacaaccagagcatgtac

SEQ ID NO: 154 - RNA, 1743 nt, synthetic construct
  source 1..1743: mol_type = other RNA
atgggcaccgtgaacaagcccgtggtgggcgtgctgatgggcttcggcatcatcaccggcaccctgcgcatcaccaaccccgtgcgcgccagcgtgctgcgctacgacgacttccacatcgacgaggacaagctggacaccaacagcgtgtacgagccctactaccacagcgaccacgccgagagcagctgggtgaaccgcggcgagagcagccgcaaggcctacgaccacaacagcccctacatctggccccgcaacgactacgacggcttcctggagaacgcccacgagcaccacggcgtgtacaaccagggccgcggcatcgacagcggcgagcgcctgatgcagcccacccagatgagcgcccaggaggacctgggcgacgacaccggcatccacgtgatccccaccctgaacggcgacgaccgccacaagatcgtgaacgtggaccagcgccagtacggcgacgtgttcaagggcgacctgaaccccaagccccagggccagcgcctgatcgaggtgagcgtggaggagaaccaccccttcaccctgcgcgcccccatccagcgcatctacggcgtgcgctacaccgagacctggagcttcctgcccagcctgacctgcaccggcgacgccgcccccgccatccagcacatctgcctgaagcacaccacctgcttccaggacgtggtggtggacgtggactgcgccgagaacaccaaggaggaccagctggccgagatcagctaccgcttccagggcaagaaggaggccgaccagccctggatcgtggtgaacaccagcaccctgttcgacgagctggagctggacccccccgagatcgagcccggcgtgctgaaggtgctgcgcaccgagaagcagtacctgggcgtgtacatctggaacatgcgcggcagcgacggcaccagcacctacgccaccttcctggtgacctggaagggcgacgaaaagacccgcaaccccacccccgccgtgaccccccagccccgcggcgccgagttccacatgtggaactaccacagccacgtgttcagcgtgggcgacaccttcagcctggccatgcacctgcagtacaagatccacgaggcccccttcgacctgctgctggagtggctgtacgtgcccatcgaccccacctgccagcccatgcgcctgtacagcacctgcctgtaccaccccaacgccccccagtgcctgagccacatgaacagcggctgcaccttcaccagcccccacctggcccagcgcgtggccagcaccgtgtaccagaactgcgagcacgccgacaactacaccgcctactgcctgggcatcagccacatggagcccagcttcggcctgatcctgcacgacggcggcaccaccctgaagttcgtggacacccccgagagcctgagcggcctgtacgtgttcgtggtgtacttcaacggccacgtggaggccgtggcctacaccgtggtgagcaccgtggaccacttcgtgaacgccatcgaggagcgcggcttcccccccaccgccggccagccccccgccaccaccaagcccaaggagatcacccccgtgaaccccggcaccagccccctgatccgctacgccgcctggaccggcggcctggccgccgtggtgctgctgtgcctggtgatcttcctgatctgcaccgccaagcgcatgcgcgtgaaggcctaccgcgtggacaagagcccctacaaccagagcatgtac

SEQ ID NO: 155 - RNA, 1743 nt, synthetic construct
  source 1..1743: mol_type = other RNA
atgggcaccgtgaacaagcccgtggtgggcgtgctgatgggcttcggcatcatcaccggcaccctgcgcatcaccaaccccgtgcgcgccagcgtgctgcgctacgacgacttccacatcgacgaggacaagctggacaccaacagcgtgtacgagccctactaccacagcgaccacgccgagagcagctgggtgaaccgcggcgagagcagccgcaaggcctacgaccacaacagcccctacatctggccccgcaacgactacgacggcttcctggagaacgcccacgagcaccacggcgtgtacaaccagggccgcggcatcgacagcggcgagcgcctgatgcagcccacccagatgagcgcccaggaggacctgggcgacgacaccggcatccacgtgatccccaccctgaacggcgacgaccgccacaagatcgtgaacgtggaccagcgccagtacggcgacgtgttcaagggcgacctgaaccccaagccccagggccagcgcctgatcgaggtgagcgtggaggagaaccaccccttcaccctgcgcgcccccatccagcgcatctacggcgtgcgctacaccgagacctggagcttcctgcccagcctgacctgcaccggcgacgccgcccccgccatccagcacatctgcctgaagcacaccacctgcttccaggacgtggtggtggacgtggactgcgccgagaacaccaaggaggaccagctggccgagatcagctaccgcttccagggcaagaaggaggccgaccagccctggatcgtggtgaacaccagcaccctgttcgacgagctggagctggacccccccgagatcgagcccggcgtgctgaaggtgctgcgcaccgagaagcagtacctgggcgtgtacatctggaacatgcgcggcagcgacggcaccagcacctacgccaccttcctggtgacctggaagggcgacgaaaagacccgcaaccccacccccgccgtgaccccccagccccgcggcgccgagttccacatgtggaactaccacagccacgtgttcagcgtgggcgacaccttcagcctggccatgcacctgcagtacaagatccacgaggcccccttcgacctgctgctggagtggctgtacgtgcccatcgaccccacctgccagcccatgcgcctgtacagcacctgcctgtaccaccccaacgccccccagtgcctgagccacatgaacagcggctgcaccttcaccagcccccacctggcccagcgcgtggccagcaccgtgtaccagaactgcgagcacgccgacaactacaccgcctactgcctgggcatcagccacatggagcccagcttcggcctgatcctgcacgacggcggcaccaccctgaagttcgtggacacccccgagagcctgagcggcctgtacgtgttcgtggtgtacttcaacggccacgtggaggccgtggcctacaccgtggtgagcaccgtggaccacttcgtgaacgccatcgaggagcgcggcttcccccccaccgccggccagccccccgccaccaccaagcccaaggagatcacccccgtgaaccccggcaccagccccctgatccgctacgccgcctggaccggcggcctggccgccgtggtgctgctgtgcctggtgattttcctaatatgcaccgccaagcgcatgcgcgtgaaggcctaccgcgtggacaagagcccctacaaccagagcatgtac

SEQ ID NO: 156 - RNA, 1614 nt, synthetic construct
  source 1..1614: mol_type = other RNA
atgggcaccgtgaacaagcctgttgtgggcgtgctgatgggcttcggcatcatcacaggcaccctgcggatcaccaatcctgtgcgggctagcgtgctgagatacgacgacttccacatcgacgaggacaagctggacaccaacagcgtgtacgagccctactaccacagcgatcacgccgagtctagctgggtcaacagaggcgagagcagcagaaaggcctacgaccacaacagcccctacatctggccccggaacgactacgatggcttcctggaaaatgcccacgagcaccacggcgtgtacaatcaaggcagaggcatcgacagcggcgagagactgatgcagcctacacagatgagcgcccaagaggacctgggagatgataccggcatccacgtgatccccacactgaacggcgacgacagacacaagatcgtgaacgtggaccagcggcagtacggcgacgtgttcaagggcgacctgaatcctaagcctcagggccagcgcctgatcgaggtgtccgtggaggagaatcaccccttcacactgagagcccctatccagagaatctacggcgtgcgctataccgagacatggtcctttctgcccagcctgacatgtaccggggatgccgctcctgccatccagcacatttgcctgaagcacaccacctgtttccaggacgtggtggtggatgtggactgcgccgagaacaccaaagaggatcagctggccgagatcagctaccggttccagggaaagaaagaggccgaccagccttggatcgtggtcaacaccagcacactgttcgacgagctggaactggaccctcctgagattgaacccggggtgctgaaggtgctgagaaccgagaagcagtacctgggagtgtacatctggaacatgagaggcagcgacggcacctctacctacgccacctttctggtcacatggaagggcgacgagaaaacacggaaccccacaccagctgtgacccctcaacctagaggcgccgagtttcacatgtggaattaccacagccacgtgttcagcgtgggcgatacctttagcctggccatgcatctgcagtacaagatccacgaggcccctttcgacctgctgctggaatggctgtacgtgcccatcgatcctacctgccagcctatgcggctgtactccacctgtctgtatcaccccaacgctccccagtgcctgagccacatgaatagcggctgcaccttcacaagccctcacctggctcagcgagtggccagcacagtgtaccagaattgcgagcacgccgacaattacaccgcctactgtctgggcatcagccacatggaacctagcttcggcctgatcctgcacgatggcggcacaaccctgaagttcgtggatacccctgagagcctgagcggcctgtatgtgttcgtggtgtacttcaacggccacgtggaagccgtggcctacaccgtggtgtctaccgtggaccacttcgtgaacgccatcgaggaaagaggcttccctccaactgctggacagcctcctgccaccaccaagcctaaagaaatcacacccgtgaatcccggcacaagcccactgatcagatac

SEQ ID NO: 157 - RNA, 1614 nt, synthetic construct
  source 1..1614: mol_type = other RNA
atgggcaccgtgaacaagcccgtggtgggcgtgctgatgggcttcggcatcatcaccggcaccctgcgcatcaccaaccccgtgcgcgccagcgtgctgcgctacgacgacttccacatcgacgaggacaagctggacaccaacagcgtgtacgagccctactaccacagcgaccacgccgagagcagctgggtgaaccgcggcgagagcagccgcaaggcctacgaccacaacagcccctacatctggccccgcaacgactacgacggcttcctggagaacgcccacgagcaccacggcgtgtacaaccagggccgcggcatcgacagcggcgagcgcctgatgcagcccacccagatgagcgcccaggaggacctgggcgacgacaccggcatccacgtgatccccaccctgaacggcgacgaccgccacaagatcgtgaacgtggaccagcgccagtacggcgacgtgttcaagggcgacctgaaccccaagccccagggccagcgcctgatcgaggtgagcgtggaggagaaccaccccttcaccctgcgcgcccccatccagcgcatctacggcgtgcgctacaccgagacctggagcttcctgcccagcctgacctgcaccggcgacgccgcccccgccatccagcacatctgcctgaagcacaccacctgcttccaggacgtggtggtggacgtggactgcgccgagaacaccaaggaggaccagctggccgagatcagctaccgcttccagggcaagaaggaggccgaccagccctggatcgtggtgaacaccagcaccctgttcgacgagctggagctggacccccccgagatcgagcccggcgtgctgaaggtgctgcgcaccgagaagcagtacctgggcgtgtacatctggaacatgcgcggcagcgacggcaccagcacctacgccaccttcctggtgacctggaagggcgacgaaaagacccgcaaccccacccccgccgtgaccccccagccccgcggcgccgagttccacatgtggaactaccacagccacgtgttcagcgtgggcgacaccttcagcctggccatgcacctgcagtacaagatccacgaggcccccttcgacctgctgctggagtggctgtacgtgcccatcgaccccacctgccagcccatgcgcctgtacagcacctgcctgtaccaccccaacgccccccagtgcctgagccacatgaacagcggctgcaccttcaccagcccccacctggcccagcgcgtggccagcaccgtgtaccagaactgcgagcacgccgacaactacaccgcctactgcctgggcatcagccacatggagcccagcttcggcctgatcctgcacgacggcggcaccaccctgaagttcgtggacacccccgagagcctgagcggcctgtacgtgttcgtggtgtacttcaacggccacgtggaggccgtggcctacaccgtggtgagcaccgtggaccacttcgtgaacgccatcgaggagcgcggcttcccccccaccgccggccagccccccgccaccaccaagcccaaggagatcacccccgtgaaccccggcaccagccccctgatccgctac

SEQ ID NO: 158 - RNA, 1824 nt, synthetic construct
  source 1..1824: mol_type = other RNA
atgggcaccgtgaacaagcctgttgtgggcgtgctgatgggcttcggcatcatcacaggcaccctgcggatcaccaatcctgtgcgggctagcgtgctgagatacgacgacttccacatcgacgaggacaagctggacaccaacagcgtgtacgagccctactaccacagcgatcacgccgagtctagctgggtcaacagaggcgagagcagcagaaaggcctacgaccacaacagcccctacatctggccccggaacgactacgatggcttcctggaaaatgcccacgagcaccacggcgtgtacaatcaaggcagaggcatcgacagcggcgagagactgatgcagcctacacagatgagcgcccaagaggacctgggagatgataccggcatccacgtgatccccacactgaacggcgacgacagacacaagatcgtgaacgtggaccagcggcagtacggcgacgtgttcaagggcgacctgaatcctaagcctcagggccagcgcctgatcgaggtgtccgtggaagagaatcaccccttcacactgagagcccctatccagagaatctacggcgtgcgctataccgagacatggtcctttctgcccagcctgacatgtaccggggatgccgctcctgccatccagcacatttgcctgaagcacaccacctgtttccaggacgtggtggtggatgtggactgcgccgagaacaccaaagaggatcagctggccgagatcagctaccggttccagggaaagaaagaggccgaccagccttggatcgtggtcaacaccagcacactgttcgacgagctggaactggaccctcctgagattgaacccggggtgctgaaggtgctgagaaccgagaagcagtacctgggagtgtacatctggaacatgagaggcagcgacggcacctctacctacgccacctttctggtcacatggaagggcgacgagaaaacacggaaccccacaccagctgtgacccctcaacctagaggcgccgagtttcacatgtggaattaccacagccacgtgttcagcgtgggcgatacctttagcctggccatgcatctgcagtacaagatccacgaggcccctttcgacctgctgctggaatggctgtacgtgcccatcgatcctacctgccagcctatgcggctgtactccacctgtctgtatcaccccaacgctccccagtgcctgagccacatgaatagcggctgcaccttcacaagccctcacctggctcagcgagtggccagcacagtgtaccagaattgcgagcacgccgacaattacaccgcctactgtctgggcatcagccacatggaacctagcttcggcctgatcctgcacgatggcggcacaaccctgaagttcgtggatacccctgagagcctgagcggcctgtatgtgttcgtggtgtacttcaacggccacgtggaagccgtggcctacaccgtggtgtctaccgtggaccacttcgtgaacgccatcgaggaaagaggcttccctccaactgctggacagcctcctgccaccaccaagcctaaagaaatcacacccgtgaatcccggcacaagcccactgatcagatacgccgcttggacaggcggactggctgctgttgttctgctgtgcctggtcatcttcctgatctgcaccgccaagcggatgagagtgaaggcctacagagtggacaagagcccttacaaccagagcatgtactacgccggcctgcctgtgggaaatgccatcggaggatctcacggcggcagcagctataccgtgtacatcgacaagacccgg

SEQ ID NO: 159 - RNA, 1824 nt, synthetic construct
  source 1..1824: mol_type = other RNA
atgggcaccgtgaacaagcctgttgtgggcgtgctgatgggcttcggcatcatcacaggcaccctgcggatcaccaatcctgtgcgggctagcgtgctgagatacgacgacttccacatcgacgaggacaagctggacaccaacagcgtgtacgagccctactaccacagcgatcacgccgagtctagctgggtcaacagaggcgagagcagcagaaaggcctacgaccacaacagcccctacatctggccccggaacgactacgatggcttcctggaaaatgcccacgagcaccacggcgtgtacaatcaaggcagaggcatcgacagcggcgagagactgatgcagcctacacagatgagcgcccaagaggacctgggagatgataccggcatccacgtgatccccacactgaacggcgacgacagacacaagatcgtgaacgtggaccagcggcagtacggcgacgtgttcaagggcgacctgaatcctaagcctcagggccagcgcctgatcgaggtgtccgtggaagagaatcaccccttcacactgagagcccctatccagagaatctacggcgtgcgctataccgagacatggtcctttctgcccagcctgacatgtaccggggatgccgctcctgccatccagcacatttgcctgaagcacaccacctgtttccaggacgtggtggtggatgtggactgcgccgagaacaccaaagaggatcagctggccgagatcagctaccggttccagggaaagaaagaggccgaccagccttggatcgtggtcaacaccagcacactgttcgacgagctggaactggaccctcctgagattgaacccggggtgctgaaggtgctgagaaccgagaagcagtacctgggagtgtacatctggaacatgagaggcagcgacggcacctctacctacgccacctttctggtcacatggaagggcgacgagaaaacacggaaccccacaccagctgtgacccctcaacctagaggcgccgagtttcacatgtggaattaccacagccacgtgttcagcgtgggcgatacctttagcctggccatgcatctgcagtacaagatccacgaggcccctttcgacctgctgctggaatggctgtacgtgcccatcgatcctacctgccagcctatgcggctgtactccacctgtctgtatcaccccaacgctccccagtgcctgagccacatgaatagcggctgcaccttcacaagccctcacctggctcagcgagtggccagcacagtgtaccagaattgcgagcacgccgacaattacaccgcctactgtctgggcatcagccacatggaacctagcttcggcctgatcctgcacgatggcggcacaaccctgaagttcgtggatacccctgagagcctgagcggcctgtatgtgttcgtggtgtacttcaacggccacgtggaagccgtggcctacaccgtggtgtctaccgtggaccacttcgtgaacgccatcgaggaaagaggcttccctccaactgctggacagcctcctgccaccaccaagcctaaagaaatcacacccgtgaatcccggcacaagcccactgatcagatacgccgcttggacaggcggactggctgctgttgttctgctgtgcctggtcatcttcctgatctgcaccgccaagcggatgagagtgaaggccgccagagtggacaagagcccttacaaccagagcatgtactacgccggcctgcctgtgggaaatgccatcggaggatctcacggcggcagcagctataccgtgtacatcgacaagacccgg

SEQ ID NO: 160 - RNA, 1824 nt, synthetic construct
  source 1..1824: mol_type = other RNA
atgggcaccgtgaacaagcccgtggtgggcgtgctgatgggcttcggcatcatcaccggcaccctgcgcatcaccaaccccgtgcgcgccagcgtgctgcgctacgacgacttccacatcgacgaggacaagctggacaccaacagcgtgtacgagccctactaccacagcgaccacgccgagagcagctgggtgaaccgcggcgagagcagccgcaaggcctacgaccacaacagcccctacatctggccccgcaacgactacgacggcttcctggagaacgcccacgagcaccacggcgtgtacaaccagggccgcggcatcgacagcggcgagcgcctgatgcagcccacccagatgagcgcccaggaggacctgggcgacgacaccggcatccacgtgatccccaccctgaacggcgacgaccgccacaagatcgtgaacgtggaccagcgccagtacggcgacgtgttcaagggcgacctgaaccccaagccccagggccagcgcctgatcgaggtgagcgtggaggagaaccaccccttcaccctgcgcgcccccatccagcgcatctacggcgtgcgctacaccgagacctggagcttcctgcccagcctgacctgcaccggcgacgccgcccccgccatccagcacatctgcctgaagcacaccacctgcttccaggacgtggtggtggacgtggactgcgccgagaacaccaaggaggaccagctggccgagatcagctaccgcttccagggcaagaaggaggccgaccagccctggatcgtggtgaacaccagcaccctgttcgacgagctggagctggacccccccgagatcgagcccggcgtgctgaaggtgctgcgcaccgagaagcagtacctgggcgtgtacatctggaacatgcgcggcagcgacggcaccagcacctacgccaccttcctggtgacctggaagggcgacgaaaagacccgcaaccccacccccgccgtgaccccccagccccgcggcgccgagttccacatgtggaactaccacagccacgtgttcagcgtgggcgacaccttcagcctggccatgcacctgcagtacaagatccacgaggcccccttcgacctgctgctggagtggctgtacgtgcccatcgaccccacctgccagcccatgcgcctgtacagcacctgcctgtaccaccccaacgccccccagtgcctgagccacatgaacagcggctgcaccttcaccagcccccacctggcccagcgcgtggccagcaccgtgtaccagaactgcgagcacgccgacaactacaccgcctactgcctgggcatcagccacatggagcccagcttcggcctgatcctgcacgacggcggcaccaccctgaagttcgtggacacccccgagagcctgagcggcctgtacgtgttcgtggtgtacttcaacggccacgtggaggccgtggcctacaccgtggtgagcaccgtggaccacttcgtgaacgccatcgaggagcgcggcttcccccccaccgccggccagccccccgccaccaccaagcccaaggagatcacccccgtgaaccccggcaccagccccctgatccgctacgccgcctggaccggcggcctggccgccgtggtgctgctgtgcctggtgatcttcctgatctgcaccgccaagcgcatgcgcgtgaaggccgcccgcgtggacaagagcccctacaaccagagcatgtactacgccggcctgcccgtgggcaacgccatcggcggcagccacggcggcagcagctacaccgtgtacatcgacaagacccgc

SEQ ID NO: 161 - RNA, 1719 nt, synthetic construct
  source 1..1719: mol_type = other RNA
atgggcaccgtgaacaagcctgttgtgggcgtgctgatgggcttcggcatcatcacaggcaccctgcggatcaccaatcctgtgcgggctagcgtgctgagatacgacgacttccacatcgacgaggacaagctggacaccaacagcgtgtacgagccctactaccacagcgatcacgccgagtctagctgggtcaacagaggcgagagcagcagaaaggcctacgaccacaacagcccctacatctggccccggaacgactacgatggcttcctggaaaatgcccacgagcaccacggcgtgtacaatcaaggcagaggcatcgacagcggcgagagactgatgcagcctacacagatgagcgcccaagaggacctgggagatgataccggcatccacgtgatccccacactgaacggcgacgacagacacaagatcgtgaacgtggaccagcggcagtacggcgacgtgttcaagggcgacctgaatcctaagcctcagggccagcgcctgatcgaggtgtccgtggaggagaatcaccccttcacactgagagcccctatccagagaatctacggcgtgcgctataccgagacatggtcctttctgcccagcctgacatgtaccggggatgccgctcctgccatccagcacatttgcctgaagcacaccacctgtttccaggacgtggtggtggatgtggactgcgccgagaacaccaaagaggatcagctggccgagatcagctaccggttccagggaaagaaagaggccgaccagccttggatcgtggtcaacaccagcacactgttcgacgagctggaactggaccctcctgagattgaacccggggtgctgaaggtgctgagaaccgagaagcagtacctgggagtgtacatctggaacatgagaggcagcgacggcacctctacctacgccacctttctggtcacatggaagggcgacgagaaaacacggaaccccacaccagctgtgacccctcaacctagaggcgccgagtttcacatgtggaattaccacagccacgtgttcagcgtgggcgatacctttagcctggccatgcatctgcagtacaagatccacgaggcccctttcgacctgctgctggaatggctgtacgtgcccatcgatcctacctgccagcctatgcggctgtactccacctgtctgtatcaccccaacgctccccagtgcctgagccacatgaatagcggctgcaccttcacaagccctcacctggctcagcgagtggccagcacagtgtaccagaattgcgagcacgccgacaattacaccgcctactgtctgggcatcagccacatggaacctagcttcggcctgatcctgcacgatggcggcacaaccctgaagttcgtggatacccctgagagcctgagcggcctgtatgtgttcgtggtgtacttcaacggccacgtggaagccgtggcctacaccgtggtgtctaccgtggaccacttcgtgaacgccatcgaggaaagaggcttccctccaactgctggacagcctcctgccaccaccaagcctaaagaaatcacacccgtgaatcccggcacaagcccactgatcagatacgccgcttggacaggcggactggctgctgttgttctgctgtgcctggtcatcttcctgatctgcaccgccaagcggatgagagtgaaggccgccagagtggacaag

SEQ ID NO: 162 - RNA, 1719 nt, synthetic construct
  source 1..1719: mol_type = other RNA
atgggcaccgtgaacaagcccgtggtgggcgtgctgatgggcttcggcatcatcaccggcaccctgcgcatcaccaaccccgtgcgcgccagcgtgctgcgctacgacgacttccacatcgacgaggacaagctggacaccaacagcgtgtacgagccctactaccacagcgaccacgccgagagcagctgggtgaaccgcggcgagagcagccgcaaggcctacgaccacaacagcccctacatctggccccgcaacgactacgacggcttcctggagaacgcccacgagcaccacggcgtgtacaaccagggccgcggcatcgacagcggcgagcgcctgatgcagcccacccagatgagcgcccaggaggacctgggcgacgacaccggcatccacgtgatccccaccctgaacggcgacgaccgccacaagatcgtgaacgtggaccagcgccagtacggcgacgtgttcaagggcgacctgaaccccaagccccagggccagcgcctgatcgaggtgagcgtggaggagaaccaccccttcaccctgcgcgcccccatccagcgcatctacggcgtgcgctacaccgagacctggagcttcctgcccagcctgacctgcaccggcgacgccgcccccgccatccagcacatctgcctgaagcacaccacctgcttccaggacgtggtggtggacgtggactgcgccgagaacaccaaggaggaccagctggccgagatcagctaccgcttccagggcaagaaggaggccgaccagccctggatcgtggtgaacaccagcaccctgttcgacgagctggagctggacccccccgagatcgagcccggcgtgctgaaggtgctgcgcaccgagaagcagtacctgggcgtgtacatctggaacatgcgcggcagcgacggcaccagcacctacgccaccttcctggtgacctggaagggcgacgaaaagacccgcaaccccacccccgccgtgaccccccagccccgcggcgccgagttccacatgtggaactaccacagccacgtgttcagcgtgggcgacaccttcagcctggccatgcacctgcagtacaagatccacgaggcccccttcgacctgctgctggagtggctgtacgtgcccatcgaccccacctgccagcccatgcgcctgtacagcacctgcctgtaccaccccaacgccccccagtgcctgagccacatgaacagcggctgcaccttcaccagcccccacctggcccagcgcgtggccagcaccgtgtaccagaactgcgagcacgccgacaactacaccgcctactgcctgggcatcagccacatggagcccagcttcggcctgatcctgcacgacggcggcaccaccctgaagttcgtggacacccccgagagcctgagcggcctgtacgtgttcgtggtgtacttcaacggccacgtggaggccgtggcctacaccgtggtgagcaccgtggaccacttcgtgaacgccatcgaggagcgcggcttcccccccaccgccggccagccccccgccaccaccaagcccaaggagatcacccccgtgaaccccggcaccagccccctgatccgctacgccgcctggaccggcggcctggccgccgtggtgctgctgtgcctggtgatcttcctgatctgcaccgccaagcgcatgcgcgtgaaggccgcccgcgtggacaag

SEQ ID NO: 163 - RNA, 1719 nt, synthetic construct
  source 1..1719: mol_type = other RNA
atgggcaccgtgaacaagcccgtcgtgggcgtgctgatgggcttcggcatcatcaccggcaccctgcggatcaccaatcctgtgcgggccagcgtgctgagatacgacgacttccacatcgacgaggacaagctggacaccaacagcgtgtacgagccctactaccacagcgaccacgccgagagcagctgggtcaacagaggcgagtccagccggaaggcctacgaccacaacagcccctacatctggccccggaacgactacgacggcttcctggaaaatgcccacgagcaccacggcgtgtacaaccagggcagaggcatcgacagcggcgagagactgatgcagcccacccagatgagcgcccaggaagatctgggcgacgacaccggcatccacgtgatccctaccctgaacggcgacgaccggcacaagatcgtgaacgtggaccagcggcagtacggcgacgtgttcaagggcgacctgaaccccaagccccagggacagcggctgattgaggtgtccgtggaagagaaccaccccttcaccctgagagcccctatccagcggatctacggcgtgcgctataccgagacttggagcttcctgcccagcctgacctgtactggcgacgccgctcctgccatccagcacatctgcctgaagcacaccacctgtttccaggacgtggtggtggacgtggactgcgccgagaacaccaaagaggaccagctggccgagatcagctaccggttccagggcaagaaagaggccgaccagccctggatcgtcgtgaacaccagcaccctgttcgacgagctggaactggaccctcccgagatcgaacccggggtgctgaaggtgctgcggaccgagaagcagtacctgggagtgtacatctggaacatgcggggcagcgacggcacctctacctacgccaccttcctcgtgacctggaagggcgacgagaaaacccggaaccctacccctgccgtgacccctcagcctagaggcgccgagtttcacatgtggaattaccacagccacgtgttcagcgtgggcgacaccttctccctggccatgcatctgcagtacaagatccacgaggcccctttcgacctgctgctggaatggctgtacgtgcccatcgaccctacctgccagcccatgcggctgtactccacctgtctgtaccaccccaacgcccctcagtgcctgagccacatgaatagcggctgcaccttcaccagccctcacctggctcagagggtggccagcaccgtgtaccagaattgcgagcacgccgacaactacaccgcctactgcctgggcatcagccacatggaacccagcttcggcctgatcctgcacgatggcggcaccaccctgaagttcgtggacacccctgagtccctgagcggcctgtacgtgttcgtggtgtacttcaacggccacgtggaagccgtggcctacaccgtggtgtccaccgtggaccacttcgtgaacgccatcgaggaacggggcttccctccaactgctggacagcctcctgccaccaccaagcccaaagaaatcacccctgtgaaccccggcaccagcccactgctgcgctatgctgcttggacaggcggactggctgctgtggtgctgctgtgcctcgtgattttcctgatctgcaccgccaagcggatgagagtgaaggccgccagagtggacaag

SEQ ID NO: 164 - RNA, 1869 nt, synthetic construct
  source 1..1869: mol_type = other RNA
atgggcaccgtgaacaagcctgttgtgggcgtgctgatgggcttcggcatcatcacaggcaccctgcggatcaccaatcctgtgcgggctagcgtgctgagatacgacgacttccacatcgacgaggacaagctggacaccaacagcgtgtacgagccctactaccacagcgatcacgccgagtctagctgggtcaacagaggcgagagcagcagaaaggcctacgaccacaacagcccctacatctggccccggaacgactacgatggcttcctggaaaatgcccacgagcaccacggcgtgtacaatcaaggcagaggcatcgacagcggcgagagactgatgcagcctacacagatgagcgcccaagaggacctgggagatgataccggcatccacgtgatccccacactgaacggcgacgacagacacaagatcgtgaacgtggaccagcggcagtacggcgacgtgttcaagggcgacctgaatcctaagcctcagggccagcgcctgatcgaggtgtccgtggaggagaatcaccccttcacactgagagcccctatccagagaatctacggcgtgcgctataccgagacatggtcctttctgcccagcctgacatgtaccggggatgccgctcctgccatccagcacatttgcctgaagcacaccacctgtttccaggacgtggtggtggatgtggactgcgccgagaacaccaaagaggatcagctggccgagatcagctaccggttccagggaaagaaagaggccgaccagccttggatcgtggtcaacaccagcacactgttcgacgagctggaactggaccctcctgagattgaacccggggtgctgaaggtgctgagaaccgagaagcagtacctgggagtgtacatctggaacatgagaggcagcgacggcacctctacctacgccacctttctggtcacatggaagggcgacgagaaaacacggaaccccacaccagctgtgacccctcaacctagaggcgccgagtttcacatgtggaattaccacagccacgtgttcagcgtgggcgatacctttagcctggccatgcatctgcagtacaagatccacgaggcccctttcgacctgctgctggaatggctgtacgtgcccatcgatcctacctgccagcctatgcggctgtactccacctgtctgtatcaccccaacgctccccagtgcctgagccacatgaatagcggctgcaccttcacaagccctcacctggctcagcgagtggccagcacagtgtaccagaattgcgagcacgccgacaattacaccgcctactgtctgggcatcagccacatggaacctagcttcggcctgatcctgcacgatggcggcacaaccctgaagttcgtggatacccctgagagcctgagcggcctgtatgtgttcgtggtgtacttcaacggccacgtggaagccgtggcctacaccgtggtgtctaccgtggaccacttcgtgaacgccatcgaggaaagaggcttccctccaactgctggacagcctcctgccaccaccaagcctaaagaaatcacacccgtgaatcccggcacaagcccactgatcagatacgccgcttggacaggcggactggctgctgttgttctgctgtgcctggtcatcttcctgatctgcaccgccaagcggatgagagtgaaggccgccagagtggacaagagcccttacaaccagagcatgtacgccgccggcctgcctgtggacgacttcgaggatagcgagagcaccgacaccgaggaggagttcggcaacgccattggaggatctcacggcggcagcagctataccgtgtacatcgacaagacccgg

SEQ ID NO: 165 - RNA, 1869 nt, synthetic construct
  source 1..1869: mol_type = other RNA
atgggcaccgtgaacaagcccgtggtgggcgtgctgatgggcttcggcatcatcaccggcaccctgcgcatcaccaaccccgtgcgcgccagcgtgctgcgctacgacgacttccacatcgacgaggacaagctggacaccaacagcgtgtacgagccctactaccacagcgaccacgccgagagcagctgggtgaaccgcggcgagagcagccgcaaggcctacgaccacaacagcccctacatctggccccgcaacgactacgacggcttcctggagaacgcccacgagcaccacggcgtgtacaaccagggccgcggcatcgacagcggcgagcgcctgatgcagcccacccagatgagcgcccaggaggacctgggcgacgacaccggcatccacgtgatccccaccctgaacggcgacgaccgccacaagatcgtgaacgtggaccagcgccagtacggcgacgtgttcaagggcgacctgaaccccaagccccagggccagcgcctgatcgaggtgagcgtggaggagaaccaccccttcaccctgcgcgcccccatccagcgcatctacggcgtgcgctacaccgagacctggagcttcctgcccagcctgacctgcaccggcgacgccgcccccgccatccagcacatctgcctgaagcacaccacctgcttccaggacgtggtggtggacgtggactgcgccgagaacaccaaggaggaccagctggccgagatcagctaccgcttccagggcaagaaggaggccgaccagccctggatcgtggtgaacaccagcaccctgttcgacgagctggagctggacccccccgagatcgagcccggcgtgctgaaggtgctgcgcaccgagaagcagtacctgggcgtgtacatctggaacatgcgcggcagcgacggcaccagcacctacgccaccttcctggtgacctggaagggcgacgaaaagacccgcaaccccacccccgccgtgaccccccagccccgcggcgccgagttccacatgtggaactaccacagccacgtgttcagcgtgggcgacaccttcagcctggccatgcacctgcagtacaagatccacgaggcccccttcgacctgctgctggagtggctgtacgtgcccatcgaccccacctgccagcccatgcgcctgtacagcacctgcctgtaccaccccaacgccccccagtgcctgagccacatgaacagcggctgcaccttcaccagcccccacctggcccagcgcgtggccagcaccgtgtaccagaactgcgagcacgccgacaactacaccgcctactgcctgggcatcagccacatggagcccagcttcggcctgatcctgcacgacggcggcaccaccctgaagttcgtggacacccccgagagcctgagcggcctgtacgtgttcgtggtgtacttcaacggccacgtggaggccgtggcctacaccgtggtgagcaccgtggaccacttcgtgaacgccatcgaggagcgcggcttcccccccaccgccggccagccccccgccaccaccaagcccaaggagatcacccccgtgaaccccggcaccagccccctgatccgctacgccgcctggaccggcggcctggccgccgtggtgctgctgtgcctggtgatcttcctgatctgcaccgccaagcgcatgcgcgtgaaggccgcccgcgtggacaagagcccctacaaccagagcatgtacgccgccggcctgcccgtggacgacttcgaggacagcgagagcaccgacaccgaggaggagttcggcaacgccatcggcggcagccacggcggcagcagctacaccgtgtacatcgacaagacccgc

SEQ ID NO: 166 - RNA, 1743 nt, synthetic construct
  source 1..1743: mol_type = other RNA
atgggcaccgtgaacaagcctgttgtgggcgtgctgatgggcttcggcatcatcacaggcaccctgcggatcaccaatcctgtgcgggctagcgtgctgagatacgacgacttccacatcgacgaggacaagctggacaccaacagcgtgtacgagccctactaccacagcgatcacgccgagtctagctgggtcaacagaggcgagagcagcagaaaggcctacgaccacaacagcccctacatctggccccggaacgactacgatggcttcctggaaaatgcccacgagcaccacggcgtgtacaatcaaggcagaggcatcgacagcggcgagagactgatgcagcctacacagatgagcgcccaagaggacctgggagatgataccggcatccacgtgatccccacactgaacggcgacgacagacacaagatcgtgaacgtggaccagcggcagtacggcgacgtgttcaagggcgacctgaatcctaagcctcagggccagcgcctgatcgaggtgtccgtggaggagaatcaccccttcacactgagagcccctatccagagaatctacggcgtgcgctataccgagacatggtcctttctgcccagcctgacatgtaccggggatgccgctcctgccatccagcacatttgcctgaagcacaccacctgtttccaggacgtggtggtggatgtggactgcgccgagaacaccaaagaggatcagctggccgagatcagctaccggttccagggaaagaaagaggccgaccagccttggatcgtggtcaacaccagcacactgttcgacgagctggaactggaccctcctgagattgaacccggggtgctgaaggtgctgagaaccgagaagcagtacctgggagtgtacatctggaacatgagaggcagcgacggcacctctacctacgccacctttctggtcacatggaagggcgacgagaaaacacggaaccccacaccagctgtgacccctcaacctagaggcgccgagtttcacatgtggaattaccacagccacgtgttcagcgtgggcgatacctttagcctggccatgcatctgcagtacaagatccacgaggcccctttcgacctgctgctggaatggctgtacgtgcccatcgatcctacctgccagcctatgcggctgtactccacctgtctgtatcaccccaacgctccccagtgcctgagccacatgaatagcggctgcaccttcacaagccctcacctggctcagcgagtggccagcacagtgtaccagaattgcgagcacgccgacaattacaccgcctactgtctgggcatcagccacatggaacctagcttcggcctgatcctgcacgatggcggcacaaccctgaagttcgtggatacccctgagagcctgagcggcctgtatgtgttcgtggtgtacttcaacggccacgtggaagccgtggcctacaccgtggtgtctaccgtggaccacttcgtgaacgccatcgaggaaagaggcttccctccaactgctggacagcctcctgccaccaccaagcctaaagaaatcacacccgtgaatcccggcacaagcccactgatcagatacgccgcttggacaggcggactggctgctgttgttctgctgtgcctggtcatcttcctgatctgcaccgccaagcggatgagagtgaaggccgccagagtggacaagagcccttacaaccagagcatgtac

SEQ ID NO: 167 - RNA, 1743 nt, synthetic construct
  source 1..1743: mol_type = other RNA
atgggcaccgtgaacaagcccgtggtgggcgtgctgatgggcttcggcatcatcaccggcaccctgcgcatcaccaaccccgtgcgcgccagcgtgctgcgctacgacgacttccacatcgacgaggacaagctggacaccaacagcgtgtacgagccctactaccacagcgaccacgccgagagcagctgggtgaaccgcggcgagagcagccgcaaggcctacgaccacaacagcccctacatctggccccgcaacgactacgacggcttcctggagaacgcccacgagcaccacggcgtgtacaaccagggccgcggcatcgacagcggcgagcgcctgatgcagcccacccagatgagcgcccaggaggacctgggcgacgacaccggcatccacgtgatccccaccctgaacggcgacgaccgccacaagatcgtgaacgtggaccagcgccagtacggcgacgtgttcaagggcgacctgaaccccaagccccagggccagcgcctgatcgaggtgagcgtggaggagaaccaccccttcaccctgcgcgcccccatccagcgcatctacggcgtgcgctacaccgagacctggagcttcctgcccagcctgacctgcaccggcgacgccgcccccgccatccagcacatctgcctgaagcacaccacctgcttccaggacgtggtggtggacgtggactgcgccgagaacaccaaggaggaccagctggccgagatcagctaccgcttccagggcaagaaggaggccgaccagccctggatcgtggtgaacaccagcaccctgttcgacgagctggagctggacccccccgagatcgagcccggcgtgctgaaggtgctgcgcaccgagaagcagtacctgggcgtgtacatctggaacatgcgcggcagcgacggcaccagcacctacgccaccttcctggtgacctggaagggcgacgaaaagacccgcaaccccacccccgccgtgaccccccagccccgcggcgccgagttccacatgtggaactaccacagccacgtgttcagcgtgggcgacaccttcagcctggccatgcacctgcagtacaagatccacgaggcccccttcgacctgctgctggagtggctgtacgtgcccatcgaccccacctgccagcccatgcgcctgtacagcacctgcctgtaccaccccaacgccccccagtgcctgagccacatgaacagcggctgcaccttcaccagcccccacctggcccagcgcgtggccagcaccgtgtaccagaactgcgagcacgccgacaactacaccgcctactgcctgggcatcagccacatggagcccagcttcggcctgatcctgcacgacggcggcaccaccctgaagttcgtggacacccccgagagcctgagcggcctgtacgtgttcgtggtgtacttcaacggccacgtggaggccgtggcctacaccgtggtgagcaccgtggaccacttcgtgaacgccatcgaggagcgcggcttcccccccaccgccggccagccccccgccaccaccaagcccaaggagatcacccccgtgaaccccggcaccagccccctgatccgctacgccgcctggaccggcggcctggccgccgtggtgctgctgtgcctggtgatcttcctgatctgcaccgccaagcgcatgcgcgtgaaggccgcccgcgtggacaagagcccctacaaccagagcatgtac

SEQ ID NO: 168 - RNA, 4331 nt, synthetic construct
  source 1..4331: mol_type = other RNA
atgggcaccgtgaacaagcctgttgtgggcgtgctgatgggcttcggcatcatcacaggcaccctgcggatcaccaatcctgtgcgggctagcgtgctgagatacgacgacttccacatcgacgaggacaagctggacaccaacagcgtgtacgagccctactaccacagcgatcacgccgagtctagctgggtcaacagaggcgagagcagcagaaaggcctacgaccacaacagcccctacatctggccccggaacgactacgatggcttcctggaaaatgcccacgagcaccacggcgtgtacaatcaaggcagaggcatcgacagcggcgagagactgatgcagcctacacagatgagcgcccaagaggacctgggagatgataccggcatccacgtgatccccacactgaacggcgacgacagacacaagatcgtgaacgtggaccagcggcagtacggcgacgtgttcaagggcgacctgaatcctaagcctcagggccagcgcctgatcgaggtgtccgtggaggagaatcaccccttcacactgagagcccctatccagagaatctacggcgtgcgctataccgagacatggtcctttctgcccagcctgacatgtaccggggatgccgctcctgccatccagcacatttgcctgaagcacaccacctgtttccaggacgtggtggtggatgtggactgcgccgagaacaccaaagaggatcagctggccgagatcagctaccggttccagggaaagaaagaggccgaccagccttggatcgtggtcaacaccagcacactgttcgacgagctggaactggaccctcctgagattgaacccggggtgctgaaggtgctgagaaccgagaagcagtacctgggagtgtacatctggaacatgagaggcagcgacggcacctctacctacgccacctttctggtcacatggaagggcgacgagaaaacacggaaccccacaccagctgtgacccctcaacctagaggcgccgagtttcacatgtggaattaccacagccacgtgttcagcgtgggcgatacctttagcctggccatgcatctgcagtacaagatccacgaggcccctttcgacctgctgctggaatggctgtacgtgcccatcgatcctacctgccagcctatgcggctgtactccacctgtctgtatcaccccaacgctccccagtgcctgagccacatgaatagcggctgcaccttcacaagccctcacctggctcagcgagtggccagcacagtgtaccagaattgcgagcacgccgacaattacaccgcctactgtctgggcatcagccacatggaacctagcttcggcctgatcctgcacgatggcggcacaaccctgaagttcgtggatacccctgagagcctgagcggcctgtatgtgttcgtggtgtacttcaacggccacgtggaagccgtggcctacaccgtggtgtctaccgtggaccacttcgtgaacgccatcgaggaaagaggcttccctccaactgctggacagcctcctgccaccaccaagcctaaagaaatcacacccgtgaatcccggcacaagcccactgatcagatacgccgcttggacaggcggactggctgctgttgttctgctgtgcctggtcatcttcctgatctgcaccgccaagcggatgagagtgaaggcctacagagtggacaagagcccttacaaccagagcatgtactacgccggcctgcctgtggacgacttcgaggatagcgagagcaccgacaccgaggaggagttcggcaacgccattggaggatctcacggcggcagcagctataccgtgtacatcgacaagacccggtgatgacccctctccctcccccccccctaacgttactggccgaagccgcttggaataaggccggtgtgcgtttgtctatatgttattttccaccatattgccgtcttttggcaatgtgagggcccggaaacctggccctgtcttcttgacgagcattcctaggggtctttcccctctcgccaaaggaatgcaaggtctgttgaatgtcgtgaaggaagcagttcctctggaagcttcttgaagacaaacaacgtctgtagcgaccctttgcaggcagcggaaccccccacctggcgacaggtgcctctgcggccaaaagccacgtgtataagatacacctgcaaaggcggcacaaccccagtgccacgttgtgagttggatagttgtggaaagagtcaaatggctctcctcaagcgtattcaacaaggggctgaaggatgcccagaaggtaccccattgtatgggatctgatctggggcctcggtgcacatgctttacatgtgtttagtcgaggttaaaaaaacgtctaggccccccgaaccacggggacgtggttttcctttgaaaaacacgatgataagcttgccacaaccatgggcactgtcaacaagccggttgttggggtgctcatggggttcggcatcatcaccggtacactcaggattacaaatcctgtacgcgcgagtgtcttgcggtacgacgatttccatatcgatgaagataagctcgacacgaactccgtgtacgagccttattatcattctgatcatgcggagtcgtcatgggtgaatcggggtgagtcttccaggaaggcttatgatcataacagcccatacatatggcctcgtaatgattatgacggcttcctggagaacgcccatgagcaccacggtgtctataaccaaggtcgagggatagactctggggaaaggctgatgcagcctacccagatgtcggcacaggaggacctaggggatgacactggcatccatgtcatccccacgctcaatggcgacgaccgccataagatcgtgaatgtggaccagcggcagtacggggatgtcttcaaaggagaccttaaccctaagccccaagggcagcggttgatagaggtctccgttgaagaaaatcatccctttactctgcgggctcccattcaacgcatctatggggtccgctatactgagacgtggtccttcttgccgtccctgacctgtacaggtgatgctgcccccgctattcagcatatatgcctcaagcatactacttgctttcaggacgttgtggtcgatgtcgattgcgctgagaacacgaaggaggatcagttagctgagatttcctatcggttccagggtaaaaaggaggccgatcagccgtggatagtggtgaacacttcaaccctattcgacgagcttgaattggaccctcccgagatcgaacccggcgtcctgaaggttctgagaacagagaagcagtatcttggggtatatatctggaatatgcggggcagcgacggcacgtccacctatgcaaccttcttggtgacatggaagggcgatgagaagacacgtaaccccactccggctgtgacaccacagccgcgaggcgctgagttccacatgtggaattatcattcccatgtattcagtgttggggatacgttctctctggccatgcacctccagtacaagatacacgaggcgccctttgatcttttactggagtggctgtatgtgccaatcgatcctacatgtcaaccgatgaggttgtattccacttgtttatatcacccaaacgctcctcagtgtttgagtcatatgaacagtggatgtacctttacatcaccccatctggcacagagggtggcctccacggtctatcagaattgtgaacacgcagacaactatacagcctactgtctggggatcagccacatggagcctagcttcgggctgatactccacgacggtgggaccaccttaaagttcgtggatactcccgagtctttgagtggtctgtatgtgtttgtggtttattttaatggacacgtggaggcggtggcgtacacggtggtcagcacagttgaccacttcgtgaatgccatcgaggagcgggggttcccgcctacggctgggcaaccacccgctaccacgaagcccaaggagattactcctgtgaatcctgggacatcacctcttatcaggtacgccgcgtggaccggtggccttgccgcagttgttcttctgtgtctggtgattttcttgatctgcaccgcaaagcggatgcgggtcaaggcttaccgggtcgacaagagtccttacaatcagagtatgtactacgcgggcctcccggtagacgactttgaggactctgagtcgaccgacacagaagaagaattcggcaacgccatcggggggagccatggtggctcctcctacacggtgtatattgataagaccagg

SEQ ID NO: 169 - RNA, 1869 nt, synthetic construct
  source 1..1869: mol_type = other RNA
atgggcaccgtgaacaagcctgttgtgggcgtgctgatgggcttcggcatcatcacaggcaccctgcggatcaccaatcctgtgcgggctagcgtgctgagatacgacgacttccacatcgacgaggacaagctggacaccaacagcgtgtacgagccctactaccacagcgatcacgccgagtctagctgggtcaacagaggcgagagcagcagaaaggcctacgaccacaacagcccctacatctggccccggaacgactacgatggcttcctggaaaatgcccacgagcaccacggcgtgtacaatcaaggcagaggcatcgacagcggcgagagactgatgcagcctacacagatgagcgcccaagaggacctgggagatgataccggcatccacgtgatccccacactgaacggcgacgacagacacaagatcgtgaacgtggaccagcggcagtacggcgacgtgttcaagggcgacctgaatcctaagcctcagggccagcgcctgatcgaggtgtccgtggaagagaatcaccccttcacactgagagcccctatccagagaatctacggcgtgcgctataccgagacatggtcctttctgcccagcctgacatgtaccggggatgccgctcctgccatccagcacatttgcctgaagcacaccacctgtttccaggacgtggtggtggatgtggactgcgccgagaacaccaaagaggatcagctggccgagatcagctaccggttccagggaaagaaagaggccgaccagccttggatcgtggtcaacaccagcacactgttcgacgagctggaactggaccctcctgagattgaacccggggtgctgaaggtgctgagaaccgagaagcagtacctgggagtgtacatctggaacatgagaggcagcgacggcacctctacctacgccacctttctggtcacatggaagggcgacgagaaaacacggaaccccacaccagctgtgacccctcaacctagaggcgccgagtttcacatgtggaattaccacagccacgtgttcagcgtgggcgatacctttagcctggccatgcatctgcagtacaagatccacgaggcccctttcgacctgctgctggaatggctgtacgtgcccatcgatcctacctgccagcctatgcggctgtactccacctgtctgtatcaccccaacgctccccagtgcctgagccacatgaatagcggctgcaccttcacaagccctcacctggctcagcgagtggccagcacagtgtaccagaattgcgagcacgccgacaattacaccgcctactgtctgggcatcagccacatggaacctagcttcggcctgatcctgcacgatggcggcacaaccctgaagttcgtggatacccctgagagcctgagcggcctgtatgtgttcgtggtgtacttcaacggccacgtggaagccgtggcctacaccgtggtgtctaccgtggaccacttcgtgaacgccatcgaggaaagaggcttccctccaactgctggacagcctcctgccaccaccaagcctaaagaaatcacacccgtgaatcccggcacaagcccactgatcagatacgccgcttggacaggcggactggctgctgttgttctgctgtgcctggtcatcttcctgatctgcaccgccaagcggatgagagtgaaggcctacagagtggacaagagcccttacaaccagagcatgtactacgccggcctgcctgtggacgacttcgaggatagcgagagcaccgacaccgaggaagagttcggcaacgccattggaggatctcacggcggcagcagctataccgtgtacatcgacaagacccgg

SEQ ID NO: 170 - RNA, 1869 nt, synthetic construct
  source 1..1869: mol_type = other RNA
atgggcactgtcaacaagcccgtagtgggggtcctgatggggttcgggatcatcacggggactctgcggatcactaatccggttagggcctctgtgctgcgctatgacgacttccacattgatgaggataagctggacacaaatagcgtatatgagccatattaccatagcgatcatgctgagtcttcctgggtgaataggggtgagtcttcccgcaaggcttatgatcacaatagtccatacatctggccccggaatgactatgatggctttcttgagaacgcccacgagcatcatggtgtttacaaccaggggcgcggaattgacagtggagagaggttgatgcagcctactcagatgtccgctcaggaggatctgggcgacgacactggtatccatgtgattccgaccttaaacggtgatgaccggcataagatcgtgaatgtggatcaaaggcaatatggtgatgtgtttaagggggatcttaatcctaaacctcaaggacagaggttgattgaggtctctgtggaggaaaatcatcctttcactctgcgtgcgcccatacagagaatctatggagttcgatacaccgaaacctggtcttttctgcctagtctgacatgcactggggacgccgccccggcgattcagcacatatgcctgaagcataccacctgcttccaggacgtggtggtggatgtggattgtgccgagaataccaaggaggatcaactcgccgaaatctcatacaggttccagggcaagaaggaggccgaccagccgtggatcgtcgtcaatacaagtactctttttgacgagctggagctcgatccacctgagatcgagccaggtgtgctgaaagtgttgcgtactgaaaaacagtatctcggagtttatatttggaacatgaggggctctgatggtacaagcacatacgcaacctttctggtgacatggaaaggcgacgagaaaactcgtaaccccacccctgctgtgactccacagcctcggggggccgagtttcacatgtggaactaccattctcacgtgtttagtgtgggtgacacattttccctcgctatgcacctgcagtacaagatccatgaagccccctttgatcttctgctggagtggctctacgtgccgatagatccaacttgtcagcccatgaggttgtacagtacgtgcttgtaccaccccaacgccccccaatgtctgagccatatgaactccgggtgcacattcacgtcaccccatcttgcccagcgtgttgcgtccacggtgtatcagaactgcgagcacgcagataattacaccgcctattgccttggcatctcacacatggaacctagttttggcctgatcctccatgacggcggaactactctcaaattcgtggatacccctgagtctctgtccggcctgtacgtgtttgttgtatacttcaacggccatgtggaggctgtggcgtacactgttgtgagcactgtcgatcactttgtgaatgctatcgaggaaagaggctttcctccgacagctggacagccgcctgccaccactaagcccaaggagatcacacctgtcaatcccggaacctcgccactgataaggtatgccgcctggaccggcggcttggccgctgtggtgcttttgtgtttagttatttttttgatttgcactgcgaaacgcatgcgagttaaggcataccgggtggataagtcgccctacaaccagtctatgtactatgccgggctccccgtggacgattttgaggactcagagagcacggacacagaggaggagttcgggaacgcgataggggggtcccacggggggtcctcctacaccgtgtacatagacaagactcgg

SEQ ID NO: 171 - RNA, 1869 nt, synthetic construct
  source 1..1869: mol_type = other RNA
atgggcactgtcaacaagccggttgttggggtgctcatggggttcggcatcatcaccggtacactcaggattacaaatcctgtacgcgcgagtgtcttgcggtacgacgatttccatatcgatgaagataagctcgacacgaactccgtgtacgagccttattatcattctgatcatgcggagtcgtcatgggtgaatcggggtgagtcttccaggaaggcttatgatcataacagcccatacatatggcctcgtaatgattatgacggcttcctggagaacgcccatgagcaccacggtgtctataaccaaggtcgagggatagactctggggaaaggctgatgcagcctacccagatgtcggcacaggaggacctaggggatgacactggcatccatgtcatccccacgctcaatggcgacgaccgccataagatcgtgaatgtggaccagcggcagtacggggatgtcttcaaaggagaccttaaccctaagccccaagggcagcggttgatagaggtctccgttgaagaaaatcatccctttactctgcgggctcccattcaacgcatctatggggtccgctatactgagacgtggtccttcttgccgtccctgacctgtacaggtgatgctgcccccgctattcagcatatatgcctcaagcatactacttgctttcaggacgttgtggtcgatgtcgattgcgctgagaacacgaaggaggatcagttagctgagatttcctatcggttccagggtaaaaaggaggccgatcagccgtggatagtggtgaacacttcaaccctattcgacgagcttgaattggaccctcccgagatcgaacccggcgtcctgaaggttctgagaacagagaagcagtatcttggggtatatatctggaatatgcggggcagcgacggcacgtccacctatgcaaccttcttggtgacatggaagggcgatgagaagacacgtaaccccactccggctgtgacaccacagccgcgaggcgctgagttccacatgtggaattatcattcccatgtattcagtgttggggatacgttctctctggccatgcacctccagtacaagatacacgaggcgccctttgatcttttactggagtggctgtatgtgccaatcgatcctacatgtcaaccgatgaggttgtattccacttgtttatatcacccaaacgctcctcagtgtttgagtcatatgaacagtggatgtacctttacatcaccccatctggcacagagggtggcctccacggtctatcagaattgtgaacacgcagacaactatacagcctactgtctggggatcagccacatggagcctagcttcgggctgatactccacgacggtgggaccaccttaaagttcgtggatactcccgagtctttgagtggtctgtatgtgtttgtggtttattttaatggacacgtggaggcggtggcgtacacggtggtcagcacagttgaccacttcgtgaatgccatcgaggagcgggggttcccgcctacggctgggcaaccacccgctaccacgaagcccaaggagattactcctgtgaatcctgggacatcacctcttatcaggtacgccgcgtggaccggtggccttgccgcagttgttcttctgtgtctggtgattttcttgatctgcaccgcaaagcggatgcgggtcaaggcttaccgggtcgacaagagtccttacaatcagagtatgtactacgcgggcctcccggtagacgactttgaggactctgagtcgaccgacacagaagaagaattcggcaacgccatcggggggagccatggtggctcctcctacacggtgtatattgataagaccagg

SEQ ID NO: 172 - RNA, 1869 nt, synthetic construct
  source 1..1869: mol_type = other RNA
atggggacagttaataaacctgtggtgggggtattgatggggttcggaattatcacgggaacgttgcgtataacgaatccggtcagagcatccgtcttgcgatacgatgattttcacatcgatgaagacaaactggatacaaactccgtatatgagccttactaccattcagatcatgcggagtcttcatgggtaaatcggggagagtcttcgcgaaaagcgtacgatcataactcaccttatatatggccacgtaatgattatgatggatttttagagaacgcacacgaacaccatggggtgtataatcagggccgtggtatcgatagcggggaacggttaatgcaacccacacaaatgtctgcacaggaggatcttggggacgatacgggcatccacgttatccctacgttaaacggcgatgacagacataaaattgtaaatgtggaccaacgtcaatacggtgacgtgtttaaaggagatcttaatccaaaaccccaaggccaaagactcattgaggtgtcagtggaagaaaatcacccgtttactttacgcgcaccgattcagcggatttatggagtccggtacaccgagacttggagctttttgccgtcattaacctgtacgggagacgcagcgcccgccatccagcatatatgcttaaaacatacaacatgctttcaagacgtggtggtggatgtggattgcgcggaaaatactaaagaggatcagttggccgaaatcagttaccgttttcaaggtaagaaggaagcggaccaaccgtggattgttgtaaacacgagcacactgtttgatgaactcgaattagacccccccgagattgaaccgggtgtcttgaaagtacttcggacagaaaaacaatacttgggtgtgtacatttggaacatgcgcggctccgatggtacgtctacctacgccacgtttttggtcacctggaaaggggatgaaaaaacaagaaaccctacgcccgcagtaactcctcaaccaagaggggctgagtttcatatgtggaattaccactcgcatgtattttcagttggtgatacgtttagcttggcaatgcatcttcagtataagatacatgaagcgccatttgatttgctgttagagtggttgtatgtccccatcgatcctacatgtcaaccaatgcggttatattctacgtgtttgtatcatcccaacgcaccccaatgcctctctcatatgaattccggttgtacatttacctcgccacatttagcccagcgtgttgcaagcacagtgtatcaaaattgtgaacatgcagataactacaccgcatattgtctgggaatatctcatatggagcctagctttggtctaatcttacacgacgggggcaccacgttaaagtttgtagatacacccgagagtttgtcgggattatacgtttttgtggtgtattttaacgggcatgttgaagccgtagcatacactgttgtatccacagtagatcattttgtaaacgcaattgaggaacgtggatttccgccaacggccggtcagccaccggcgactactaaacccaaggaaattacccccgtaaaccccggaacgtcaccacttatacgatatgccgcatggaccggagggcttgcagcagtagtacttttatgtctcgtaatatttttaatctgtacggctaaacgaatgagggttaaagcctatagggtagacaagtccccgtataaccaaagcatgtattacgctggccttccagtggacgatttcgaggactcggaatctacggatacggaagaagagtttggtaacgcgattggagggagtcacgggggttcgagttacacggtgtatatagataagacccgg

SEQ ID NO: 173 - RNA, 1869 nt, synthetic construct; identical to SEQ ID NO: 171
  source 1..1869: mol_type = other RNA

SEQ ID NO: 174 - RNA, 1869 nt, synthetic construct
  source 1..1869: mol_type = other RNA
atgggtactgtgaataagcctgtggtgggggttctaatggggttcgggatcatcactggaacactgaggattaccaatcccgttagggcctccgtgctgcgttacgatgacttccacatcgacgaggataagctggataccaattcagtttatgagccttactaccactctgatcacgccgagagctcttgggtgaatcggggggagtcctctaggaaagcctatgatcataattctccatatatatggccaagaaatgattatgatggttttctggagaatgcacacgaacatcacggcgtttataaccaaggtcgtgggattgactcgggcgagcgtctgatgcaacccactcagatgtccgctcaggaagacctgggcgatgacactgggattcatgtgattccaactcttaatggcgacgatcgccataagattgtgaatgtggatcagagacagtatggagatgtgtttaagggcgatctgaatccgaagccccagggtcagagactcatcgaagtgagtgtggaggaaaaccatccctttactctgagggctccgattcagcgcatctacggtgtgcgctacactgagacttggagtttcctgccgtctttgacttgcacaggtgacgctgcccccgctattcagcatatttgcctcaagcacacaacatgcttccaggatgttgtggttgacgtggattgcgcagagaacaccaaagaggatcaattggccgaaatctcctatcgtttccaaggaaagaaggaggctgatcagccttggattgtggttaatacctctaccttgttcgatgagctggagctcgatcctcctgagatcgagcccggcgtgttgaaggttctcaggactgagaagcagtatttgggggtgtacatctggaatatgcggggtagtgacggaacgtccacctacgccacttttcttgtgacctggaaaggcgatgagaagacacgtaaccctacccctgctgtgactccacagccaaggggtgcggagttccacatgtggaattatcacagtcacgtgtttagcgttggcgatacgttcagtctggcaatgcatctgcagtataagatacacgaggcgccctttgatcttctgctagaatggttgtatgtcccaattgatccaacctgtcagcctatgaggctgtacagcacttgtctgtaccatcctaacgctcctcaatgtctttcgcacatgaacagtgggtgcaccttcacatctccgcatctggcgcagagggtggcctccaccgtctatcagaattgcgaacacgccgataactataccgcttattgtctggggattagccacatggagcccagctttgggctgatcctgcacgacggtgggacgactctgaagtttgtggacactccagagtctctcagcggtttgtacgtgttcgtggtgtatttcaatgggcatgtcgaggccgtggcctacaccgttgtaagtactgtggatcactttgtgaatgctatcgaggagcgtggcttcccgcccacggcgggacagccgcctgccacgacgaagcccaaggagatcactccagtgaatcctggtacatcgcctttgatacggtacgcagcctggactggtggtctggctgctgtcgtgctcttatgtctggtgatctttctgatttgtactgctaagcggatgcgagtgaaggcttatcgggtcgataagagcccatacaatcagagcatgtactatgctggtctccctgtggatgattttgaagatagtgagagcacagacactgaggaggagtttggcaatgccatcggtggtagccacggcggatcttcttacactgtctatatcgacaagactcgt

SEQ ID NO: 175 - RNA, 1869 nt, synthetic construct
  source 1..1869: mol_type = other RNA
atggggactgttaataagccagttgtgggagttctgatggggttcggtatcatcactgggactctcaggattaccaatcctgttcgcgcctctgttttacgctatgatgactttcatattgatgaggataagctcgacacaaactctgtgtacgagccttattatcatagcgatcatgcagagtcgtcatgggtaaataggggtgagagttcccgcaaggcttatgatcataacagtccttatatctggccaagaaatgattacgatggtttcttggagaatgcccatgagcatcatggtgtttacaaccagggcagggggattgattctggagagcgtcttatgcagcctacccagatgtccgcccaggaggacctgggtgatgacactgggatccatgtgattccaactcttaatggtgacgatcgccataagattgtgaacgtggatcagaggcagtatggggacgtttttaagggcgatctcaatcctaagccgcagggacagaggctgatcgaggtttctgtggaggagaaccatccctttaccttgcgggctccaatccaaaggatctatggagtgaggtacacagaaacttggtcatttctgccctcgcttacctgcactggagatgctgctcccgctattcaacatatctgtctcaagcacaccacgtgcttccaggatgtggttgtagacgtcgattgcgctgagaataccaaggaggatcagctggctgagatcagttaccgcttccaggggaagaaggaagctgatcagccttggattgttgtgaatacgtctacactgtttgacgagcttgaactggaccctccagaaatcgagccaggtgtgttgaaagtgttgaggactgagaaacagtaccttggagtgtatatctggaatatgagaggttccgacgggacctctacatatgccactttcctcgtgacgtggaagggcgacgagaagactcggaatcccacgccggctgtgaccccacagccgcgtggggccgagtttcacatgtggaattatcattctcacgtgttctctgtgggcgacacgttcagtttggccatgcaccttcagtacaagatacacgaagccccttttgatcttctgctcgaatggctgtatgtgccaattgacccgacgtgtcagcccatgagattatactctacgtgtttatatcatccaaatgctccacagtgtttgagtcatatgaacagtgggtgtacgttcacaagtcctcatctagcgcagcgcgtggcttccactgtctatcagaactgtgagcacgcagacaactatacagcctactgtctggggattagccacatggagccaagctttgggctgattcttcacgacggtggcaccacacttaagttcgtggacactcccgagtctttaagtgggttgtatgtttttgtggtttatttcaatggacacgtggaagccgtggcttacactgtggtgagtactgtggatcacttcgtgaatgccatcgaggagcgggggtttcctcctacggcaggacagccccccgcgaccacaaagcctaaggaaattaccccggtgaatccaggtacctcgcctcttatcaggtatgcagcctggaccggtggtctggctgcagtcgtgctactatgcctcgtgattttcttgatctgcactgctaaacgcatgcgtgtcaaggcttatagggtggataaatccccctataaccagtctatgtactatgctggccttcctgtggacgacttcgaggattcggagtcgaccgatacagaggaggagtttggcaatgcgatcggggggagtcacgggggtagtagctacactgtgtatatcgataagacgagg

SEQ ID NO: 176 - RNA, 1869 nt, synthetic construct
  source 1..1869: mol_type = other RNA
atggggactgttaataagcctgtggtcggagtgttgatggggtttgggatcatcaccgggacattgaggatcacgaatcctgttcgtgcctcggtgttgcggtacgatgatttccacatagatgaggataagttggataccaattccgtttatgagccctattaccactctgaccacgccgaatcatcttgggtgaaccggggtgagtcttcgcgcaaggcttatgatcataattctccatacatatggccaagaaatgattatgatggtttcctggagaatgcccatgagcatcatggcgtttataaccaaggcagggggattgattctggagagcgtcttatgcagcctacccagatgtccgcccaggaggacctgggtgatgacactgggatccatgtgattccaactcttaatggtgacgatcgccataagattgtgaacgtggatcagaggcagtatggggacgtttttaagggcgatctcaatcctaagccgcagggacagaggctgatcgaggtttctgtggaggagaaccatccctttaccttgcgggctccaatccaaaggatctatggagtgaggtacacagaaacttggtcatttctgccctcgcttacctgcactggtgacgctgcccctgctattcagcatatatgccttaagcatacaacttgttttcaggatgtggtggtggatgttgattgcgctgagaataccaaggaagatcagcttgccgaaatttcttacagatttcagggcaaaaaggaagctgatcaaccttggattgttgtcaatacatccacgctttttgacgagctggagctcgatcccccggaaatcgagcctggcgtgttgaaggtgctgcgtactgagaagcaatatcttggggtgtatatctggaatatgcgggggtcggacggcaccagtacctatgccactttcctcgtgacgtggaagggcgacgagaagactcggaatcccacgccggctgtgaccccacagccgcgtggggccgagtttcacatgtggaattatcattctcacgtgttctctgtgggcgacacgttcagtttggccatgcaccttcagtacaagatacacgaagccccttttgatcttctgctcgaatggctgtatgtgccaattgacccgacgtgtcagcccatgagattatactctacgtgtttatatcatccaaatgctccacagtgtttgagtcatatgaacagtgggtgtacgttcacaagtccccacctagcccagcgggtggcctcgacggtgtaccagaattgtgagcatgctgacaactatacggcatactgcctcggaattagccacatggagccaagcttcgggctgattctgcatgacggtggaactacacttaaattcgtggacactcctgagtcgcttagcgggttgtacgtgtttgtagtgtatttcaatggtcatgttgaggcagtggcttataccgttgtcagcactgttgatcattttgtgaacgccattgaggagcgggggttcccgcctacggctgggcaaccccccgctacgactaagcccaaagagattacaccagtgaaccctggcacaagccccctgattaggtatgctgcctggacaggcgggcttgctgccgtggtgttgctgtgtctagtcatctttttgatctgcactgccaagcggatgcgggtcaaggcttatcgggttgacaagtctccgtataatcagtcgatgtattacgcaggccttcctgtggatgattttgaggactctgagtccacagacaccgaggaggagtttggtaatgctattggcggtagtcacggggggtcgtcatatacagtgtatatcgacaagactcgg

SEQ ID NO: 177 - RNA, 1869 nt, synthetic construct
  source 1..1869: mol_type = other RNA
atggggactgttaataagccagttgtgggagttctgatggggttcggtatcatcactgggactctcaggattaccaatcctgttcgcgcctctgttttacgctatgatgactttcatattgatgaggataagctcgacacaaactctgtgtacgagccttattatcatagcgatcatgcagagtcgtcatgggtaaataggggtgagagttcccgcaaggcttatgatcataacagtccttatatctggccaagaaatgattacgatggtttcttggagaatgcccatgagcatcatggtgtttacaaccagggtcggggtatcgactctggcgagagattgatgcaaccgacccaaatgagtgcgcaggaggacctaggcgatgataccgggattcacgtgattcctactctgaatggcgacgacagacacaagattgtcaatgttgatcagcggcagtacggggatgtgttcaagggtgacctcaatccgaagcctcaggggcagaggctcattgaggtttcggttgaggagaatcatccttttacactccgtgctcctattcagaggatttacggggtccggtatacagagacctggtcttttctgccgtcacttacttgcactggagatgctgctcccgctattcaacatatctgtctcaagcacaccacgtgcttccaggatgtggttgtagacgtcgattgcgctgagaataccaaggaggatcagctggctgagatcagttaccgcttccaggggaagaaggaagctgatcagccttggattgttgtgaatacgtctacactgtttgacgagcttgaactggaccctccagaaatcgagccaggtgtgttgaaagtgttgaggactgagaaacagtaccttggagtgtatatctggaatatgagaggttccgacgggacctctacatatgccactttcctcgtgacgtggaagggcgacgagaagactcggaatcccacgccggctgtgaccccacagccgcgtggggccgagtttcacatgtggaattatcattctcacgtgttctctgtgggcgacacgttcagtttggccatgcaccttcagtacaagatacacgaagccccttttgatcttctgctcgaatggctgtatgtgccaattgacccgacgtgtcagcccatgagattatactctacgtgtttatatcatccaaatgctccacagtgtttgagtcatatgaacagtgggtgtacgttcacaagtcctcatctagcgcagcgcgtggcttccactgtctatcagaactgtgagcacgcagacaactatacagcctactgtctggggattagccacatggagccaagctttgggctgattcttcacgacggtggcaccacacttaagttcgtggacactcccgagtctttaagtgggttgtatgtttttgtggtttatttcaatggacacgtggaagccgtggcttacactgtggtgagtactgtggatcacttcgtgaatgccatcgaggagcgggggtttcctcctacggcaggacagccccccgcgaccacaaagcctaaggaaattaccccggtgaatccaggtacctcgcctcttatcaggtatgcagcctggaccggtggtctggctgcagtcgtgctactatgcctcgtgattttcttgatctgcactgctaaacgcatgcgtgtcaaggcttatagggtggataaatccccctataaccagtctatgtactatgctggccttcctgtggacgacttcgaggattcggagtcgaccgatacagaggaggagtttggcaatgcgatcggggggagtcacgggggtagtagctacactgtgtatatcgataagacgagg

SEQ ID NO: 178 - RNA, 1869 nt, synthetic construct
  source 1..1869: mol_type = other RNA
atggggactgttaataagcctgtggtcggagtgttgatggggtttgggatcatcaccgggacattgaggatcacgaatcctgttcgtgcctcggtgttgcggtacgatgatttccacatagatgaggataagttggataccaattccgtttatgagccctattaccactctgaccacgccgaatcatcttgggtgaaccggggtgagtcttcgcgcaaggcttatgatcataattctccatacatatggccaagaaatgattatgatggtttcctggagaatgcccatgagcatcatggcgtttataaccaaggcagggggattgattctggagagcgtcttatgcagcctacccagatgtccgcccaggaggacctgggtgatgacactgggatccatgtgattccaactcttaatggtgacgatcgccataagattgtgaacgtggatcagaggcagtatggggacgtttttaagggcgatctcaatcctaagccgcagggacagaggctgatcgaggtttctgtggaggagaaccatccctttaccttgcgggctccaatccaaaggatctatggagtgaggtacacagaaacttggtcatttctgccctcgcttacctgcactggtgacgctgcccctgctattcagcatatatgccttaagcatacaacttgttttcaggatgtggtggtggatgttgattgcgctgagaataccaaggaagatcagcttgccgaaatttcttacagatttcagggcaaaaaggaagctgatcaaccttggattgttgtcaatacatccacgctttttgacgagctggagctcgatcccccggaaatcgagcctggcgtgttgaaggtgctgcgtactgagaagcaatatcttggggtgtatatctggaatatgcgggggtcggacggcaccagtacctatgccactttcctcgtgacgtggaagggcgacgagaagactcggaatcccacgccggctgtgaccccacagccgcgtggggccgagtttcacatgtggaattatcattctcacgtgttctctgtgggcgacacgttcagtttggccatgcaccttcagtacaagatacacgaagccccttttgatcttctgctcgaatggctgtatgtgccaattgacccgacgtgtcagcccatgagattatactctacgtgtttatatcatccaaatgctccacagtgtttgagtcatatgaacagtgggtgtacgttcacaagtccccacctagcccagcgggtggcctcgacggtgtaccagaattgtgagcatgctgacaactatacggcatactgcctcggaattagccacatggagccaagcttcgggctgattctgcatgacggtggaactacacttaaattcgtggacactcctgagtcgcttagcgggttgtacgtgtttgtagtgtatttcaatggtcatgttgaggcagtggcttataccgttgtcagcactgttgatcattttgtgaacgccattgaggagcgggggttcccgcctacggctgggcaaccccccgctacgactaagcctaaggaaattaccccggtgaatccaggtacctcgcctcttatcaggtatgcagcctggaccggtggtctggctgcagtcgtgctactatgcctcgtgattttcttgatctgcactgctaaacgcatgcgtgtcaaggcttatagggtggataaatccccctataaccagtctatgtactatgctggccttcctgtggacgacttcgaggattcggagtcgaccgatacagaggaggagtttggcaatgcgatcggggggagtcacgggggtagtagctacactgtgtatatcgataagacgagg

SEQ ID NO: 179 - RNA, 1869 nt, synthetic construct
  source 1..1869: mol_type = other RNA
atggggactgttaataagcctgtggtcggagtgttgatggggtttgggatcatcaccgggacattgaggatcacgaatcctgttcgtgcctcggtgttgcggtacgatgatttccacatagatgaggataagttggataccaattccgtttatgagccctattaccactctgaccacgccgaatcatcttgggtgaaccggggtgagtcttcgcgcaaggcttatgatcataattctccatacatatggccaagaaatgattatgatggtttcctggagaatgcccatgagcatcatggcgtttataaccaaggtcggggtatcgactctggcgagagattgatgcaaccgacccaaatgagtgcgcaggaggacctaggcgatgataccgggattcacgtgattcctactctgaatggcgacgacagacacaagattgtcaatgttgatcagcggcagtacggggatgtgttcaagggtgacctcaatccgaagcctcaggggcagaggctcattgaggtttcggttgaggagaatcatccttttacactccgtgctcctattcagaggatttacggggtccggtatacagagacctggtcttttctgccgtcacttacttgcactggtgacgctgcccctgctattcagcatatatgccttaagcatacaacttgttttcaggatgtggtggtggatgttgattgcgctgagaataccaaggaagatcagcttgccgaaatttcttacagatttcagggcaaaaaggaagctgatcaaccttggattgttgtcaatacatccacgctttttgacgagctggagctcgatcccccggaaatcgagcctggcgtgttgaaggtgctgcgtactgagaagcaatatcttggggtgtatatctggaatatgcgggggtcggacggcaccagtacctatgccacctttctagtaacctggaagggtgacgagaagacccggaaccccacccctgctgtgactccgcagcctaggggtgcggagttccacatgtggaattaccattcccatgtgttttccgtgggtgatacgttcagtctggctatgcacctccagtataagatacacgaagctccttttgatcttctactggaatggctgtatgtgccgattgaccctacgtgtcagcccatgagattgtattcgacgtgtttgtatcatccaaatgctccacagtgtttgagtcatatgaacagcggatgcactttcaccagtccccacctagcccagcgggtggcctcgacggtgtaccagaattgtgagcatgctgacaactatacggcatactgcctcggaattagccacatggagccaagcttcgggctgattctgcatgacggtggaactacacttaaattcgtggacactcctgagtcgcttagcgggttgtacgtgtttgtagtgtatttcaatggtcatgttgaggcagtggcttataccgttgtcagcactgttgatcattttgtgaacgccattgaggagcgggggttcccgcctacggctgggcaaccccccgctacgactaagcccaaagagattacaccagtgaaccctggcacaagccccctgattaggtatgctgcctggacaggcgggcttgctgccgtggtgttgctgtgtctagtcatctttttgatctgcactgccaagcggatgcgggtcaaggcttatcgggttgacaagtctccgtataatcagtcgatgtattacgcaggccttcctgtggatgattttgaggactctgagtccacagacaccgaggaggagtttggtaatgctattggcggtagtcacggggggtcgtcatatacagtgtatatcgacaagactcgg

SEQ ID NO: 180 - RNA, 1869 nt, synthetic construct
  source 1..1869: mol_type = other RNA
atggggactgttaataagccagttgtgggagttctgatggggttcggtatcatcactgggactctcaggattaccaatcctgttcgcgcctctgttttacgctatgatgactttcatattgatgaggataagctcgacacaaactctgtgtacgagccttattatcatagcgatcatgcagagtcgtcatgggtaaataggggtgagagttcccgcaaggcttatgatcataacagtccttatatctggccaagaaatgattacgatggtttcttggagaatgcccatgagcatcatggtgtttacaaccagggcagggggattgattctggagagcgtcttatgcagcctacccagatgtccgcccaggaggacctgggtgatgacactgggatccatgtgattccaactcttaatggtgacgatcgccataagattgtgaacgtggatcagaggcagtatggggacgtttttaagggcgatctcaatcctaagccgcagggacagaggctgatcgaggtttctgtggaggagaaccatccctttaccttgcgggctccaatccaaaggatctatggagtgaggtacacagaaacttggtcatttctgccctcgcttacctgcactggtgacgctgcccctgctattcagcatatatgccttaagcatacaacttgttttcaggatgtggtggtggatgttgattgcgctgagaataccaaggaagatcagcttgccgaaatttcttacagatttcagggcaaaaaggaagctgatcaaccttggattgttgtcaatacatccacgctttttgacgagctggagctcgatcccccggaaatcgagcctggcgtgttgaaggtgctgcgtactgagaagcaatatcttggggtgtatatctggaatatgcgggggtcggacggcaccagtacctatgccactttcctcgtgacgtggaagggcgacgagaagactcggaatcccacgccggctgtgaccccacagccgcgtggggccgagtttcacatgtggaattatcattctcacgtgttctctgtgggcgacacgttcagtttggccatgcaccttcagtacaagatacacgaagccccttttgatcttctgctcgaatggctgtatgtgccaattgacccgacgtgtcagcccatgagattatactctacgtgtttatatcatccaaatgctccacagtgtttgagtcatatgaacagtgggtgtacgttcacaagtcctcatctagcgcagcgcgtggcttccactgtctatcagaactgtgagcacgcagacaactatacagcctactgtctggggattagccacatggagccaagctttgggctgattcttcacgacggtggcaccacacttaagttcgtggacactcccgagtctttaagtgggttgtatgtttttgtggtttatttcaatggacacgtggaagccgtggcttacactgtggtgagtactgtggatcacttcgtgaatgccatcgaggagcgggggtttcctcctacggcaggacagccccccgcgaccacaaagcctaaggaaattaccccggtgaatccaggtacctcgcctcttatcaggtatgcagcctggaccggtggtctggctgcagtcgtgctactatgcctcgtgattttcttgatctgcactgctaaacgcatgcgtgtcaaggcttatagggtggataaatccccctataaccagtctatgtactatgctggccttcctgtggacgacttcgaggattcggagtcgaccgatacagaggaggagtttggcaatgcgatcggggggagtcacgggggtagtagctacactgtgtatatcgataagacgagg

SEQ ID NO: 181 - RNA, 1869 nt, synthetic construct
  source 1..1869: mol_type = other RNA
atggggactgttaataagcctgtggtcggagtgttgatggggtttgggatcatcaccgggacattgaggatcacgaatcctgttcgtgcctcggtgttgcggtacgatgatttccacatagatgaggataagttggataccaattccgtttatgagccctattaccactctgaccacgccgaatcatcttgggtgaaccggggtgagtcttcgcgcaaggcttatgatcataattctccatacatatggccaagaaatgattatgatggtttcctggagaatgcccatgagcatcatggcgtttataaccaaggcagggggattgattctggagagcgtcttatgcagcctacccagatgtccgcccaggaggacctgggtgatgacactgggatccatgtgattccaactcttaatggtgacgatcgccataagattgtgaacgtggatcagaggcagtatggggacgtttttaagggcgatctcaatcctaagccgcagggacagaggctgatcgaggtttctgtggaggagaaccatccctttaccttgcgggctccaatccaaaggatctatggagtgaggtacacagaaacttggtcatttctgccctcgcttacctgcactggagatgctgctcccgctattcaacatatctgtctcaagcacaccacgtgcttccaggatgtggttgtagacgtcgattgcgctgagaataccaaggaggatcagctggctgagatcagttaccgcttccaggggaagaaggaagctgatcagccttggattgttgtgaatacgtctacactgtttgacgagcttgaactggaccctccagaaatcgagccaggtgtgttgaaagtgttgaggactgagaaacagtaccttggagtgtatatctggaatatgagaggttccgacgggacctctacatatgccacctttctagtaacctggaagggtgacgagaagacccggaaccccacccctgctgtgactccgcagcctaggggtgcggagttccacatgtggaattaccattcccatgtgttttccgtgggtgatacgttcagtctggctatgcacctccagtataagatacacgaagctccttttgatcttctactggaatggctgtatgtgccgattgaccctacgtgtcagcccatgagattgtattcgacgtgtttgtatcatccaaatgctccacagtgtttgagtcatatgaacagcggatgcactttcaccagtccccacctagcccagcgggtggcctcgacggtgtaccagaattgtgagcatgctgacaactatacggcatactgcctcggaattagccacatggagccaagcttcgggctgattctgcatgacggtggaactacacttaaattcgtggacactcctgagtcgcttagcgggttgtacgtgtttgtagtgtatttcaatggtcatgttgaggcagtggcttataccgttgtcagcactgttgatcattttgtgaacgccattgaggagcgggggttcccgcctacggctgggcaaccccccgctacgactaagcccaaagagattacaccagtgaaccctggcacaagccccctgattaggtatgctgcctggacaggcgggcttgctgccgtggtgttgctgtgtctagtcatctttttgatctgcactgccaagcggatgcgggtcaaggcttatcgggttgacaagtctccgtataatcagtcgatgtattacgcaggccttcctgtggatgattttgaggactctgagtccacagacaccgaggaggagtttggtaatgctattggcggtagtcacggggggtcgtcatatacagtgtatatcgacaagactcgg

SEQ ID NO: 182 - RNA, 1869 nt, synthetic construct
  source 1..1869: mol_type = other RNA
atggggactgttaataagcctgtggtcggagtgttgatggggtttgggatcatcaccgggacattgaggatcacgaatcctgttcgtgcctcggtgttgcggtacgatgatttccacatagatgaggataagttggataccaattccgtttatgagccctattaccactctgaccacgccgaatcatcttgggtgaaccggggtgagtcttcgcgcaaggcttatgatcataattctccatacatatggccaagaaatgattatgatggtttcctggagaatgcccatgagcatcatggcgtttataaccaaggcagggggattgattctggagagcgtcttatgcagcctacccagatgtccgcccaggaggacctgggtgatgacactgggatccatgtgattccaactcttaatggtgacgatcgccataagattgtgaacgtggatcagaggcagtatggggacgtttttaagggcgatctcaatcctaagccgcagggacagaggctgatcgaggtttctgtggaggagaaccatccctttaccttgcgggctccaatccaaaggatctatggagtgaggtacacagaaacttggtcatttctgccctcgcttacctgcactggagatgctgctcccgctattcaacatatctgtctcaagcacaccacgtgcttccaggatgtggttgtagacgtcgattgcgctgagaataccaaggaggatcagctggctgagatcagttaccgcttccaggggaagaaggaagctgatcagccttggattgttgtgaatacgtctacactgtttgacgagcttgaactggaccctccagaaatcgagccaggtgtgttgaaagtgttgaggactgagaaacagtaccttggagtgtatatctggaatatgagaggttccgacgggacctctacatatgccactttcctcgtgacgtggaagggcgacgagaagactcggaatcccacgccggctgtgaccccacagccgcgtggggccgagtttcacatgtggaattatcattctcacgtgttctctgtgggcgacacgttcagtttggccatgcaccttcagtacaagatacacgaagccccttttgatcttctgctcgaatggctgtatgtgccaattgacccgacgtgtcagcccatgagattatactctacgtgtttatatcatccaaatgctccacagtgtttgagtcatatgaacagtgggtgtacgttcacaagtcctcatctagcgcagcgcgtggcttccactgtctatcagaactgtgagcacgcagacaactatacagcctactgtctggggattagccacatggagccaagctttgggctgattcttcacgacggtggcaccacacttaagttcgtggacactcccgagtctttaagtgggttgtatgtttttgtggtttatttcaatggacacgtggaagccgtggcttacactgtggtgagtactgtggatcacttcgtgaatgccatcgaggagcgggggtttcctcctacggcaggacagccccccgcgaccacaaagcctaaggaaattaccccggtgaatccaggtacctcgcctcttatcaggtatgcagcctggaccggtggtctggctgcagtcgtgctactatgcctcgtgattttcttgatctgcactgctaaacgcatgcgtgtcaaggcttatagggtggataaatccccctataaccagtctatgtactatgctggccttcctgtggacgacttcgaggattcggagtcgaccgatacagaggaggagtttggcaatgcgatcggggggagtcacgggggtagtagctacactgtgtatatcgataagacgagg

SEQ ID NO: 183 - RNA, 1869 nt, synthetic construct
  source 1..1869: mol_type = other RNA
atggggactgttaataagccagttgtgggagttctgatggggttcggtatcatcactgggactctcaggattaccaatcctgttcgcgcctctgttttacgctatgatgactttcatattgatgaggataagctcgacacaaactctgtgtacgagccttattatcatagcgatcatgcagagtcgtcatgggtaaataggggtgagagttcccgcaaggcttatgatcataacagtccttatatctggccaagaaatgattacgatggtttcttggagaatgcccatgagcatcatggtgtttacaaccagggtcggggtatcgactctggcgagagattgatgcaaccgacccaaatgagtgcgcaggaggacctaggcgatgataccgggattcacgtgattcctactctgaatggcgacgacagacacaagattgtcaatgttgatcagcggcagtacggggatgtgttcaagggtgacctcaatccgaagcctcaggggcagaggctcattgaggtttcggttgaggagaatcatccttttacactccgtgctcctattcagaggatttacggggtccggtatacagagacctggtcttttctgccgtcacttacttgcactggagatgctgctcccgctattcaacatatctgtctcaagcacaccacgtgcttccaggatgtggttgtagacgtcgattgcgctgagaataccaaggaggatcagctggctgagatcagttaccgcttccaggggaagaaggaagctgatcagccttggattgttgtgaatacgtctacactgtttgacgagcttgaactggaccctccagaaatcgagccaggtgtgttgaaagtgttgaggactgagaaacagtaccttggagtgtatatctggaatatgagaggttccgacgggacctctacatatgccacctttctagtaacctggaagggtgacgagaagacccggaaccccacccctgctgtgactccgcagcctaggggtgcggagttccacatgtggaattaccattcccatgtgttttccgtgggtgatacgttcagtctggctatgcacctccagtataagatacacgaagctccttttgatcttctactggaatggctgtatgtgccgattgaccctacgtgtcagcccatgagattgtattcgacgtgtttgtatcatccaaatgctccacagtgtttgagtcatatgaacagcggatgcactttcaccagtcctcatctagcgcagcgcgtggcttccactgtctatcagaactgtgagcacgcagacaactatacagcctactgtctggggattagccacatggagccaagctttgggctgattcttcacgacggtggcaccacacttaagttcgtggacactcccgagtctttaagtgggttgtatgtttttgtggtttatttcaatggacacgtggaagccgtggcttacactgtggtgagtactgtggatcacttcgtgaatgccatcgaggagcgggggtttcctcctacggcaggacagccccccgcgaccacaaagcccaaagagattacaccagtgaaccctggcacaagccccctgattaggtatgctgcctggacaggcgggcttgctgccgtggtgttgctgtgtctagtcatctttttgatctgcactgccaagcggatgcgggtcaaggcttatcgggttgacaagtctccgtataatcagtcgatgtattacgcaggccttcctgtggatgattttgaggactctgagtccacagacaccgaggaggagtttggtaatgctattggcggtagtcacggggggtcgtcatatacagtgtatatcgacaagactcgg

SEQ ID NO: 184 - RNA, 1869 nt, synthetic construct
  source 1..1869: mol_type = other RNA
atggggactgttaataagccagttgtgggagttctgatggggttcggtatcatcactgggactctcaggattaccaatcctgttcgcgcctctgttttacgctatgatgactttcatattgatgaggataagctcgacacaaactctgtgtacgagccttattatcatagcgatcatgcagagtcgtcatgggtaaataggggtgagagttcccgcaaggcttatgatcataacagtccttatatctggccaagaaatgattacgatggtttcttggagaatgcccatgagcatcatggtgtttacaaccagggcagggggattgattctggagagcgtcttatgcagcctacccagatgtccgcccaggaggacctgggtgatgacactgggatccatgtgattccaactcttaatggtgacgatcgccataagattgtgaacgtggatcagaggcagtatggggacgtttttaagggcgatctcaatcctaagccgcagggacagaggctgatcgaggtttctgtggaggagaaccatccctttaccttgcgggctccaatccaaaggatctatggagtgaggtacacagaaacttggtcatttctgccctcgcttacctgcactggtgacgctgcccctgctattcagcatatatgccttaagcatacaacttgttttcaggatgtggtggtggatgttgattgcgctgagaataccaaggaagatcagcttgccgaaatttcttacagatttcagggcaaaaaggaagctgatcaaccttggattgttgtcaatacatccacgctttttgacgagctggagctcgatcccccggaaatcgagcctggcgtgttgaaggtgctgcgtactgagaagcaatatcttggggtgtatatctggaatatgcgggggtcggacggcaccagtacctatgccacctttctagtaacctggaagggtgacgagaagacccggaaccccacccctgctgtgactccgcagcctaggggtgcggagttccacatgtggaattaccattcccatgtgttttccgtgggtgatacgttcagtctggctatgcacctccagtataagatacacgaagctccttttgatcttctactggaatggctgtatgtgccgattgaccctacgtgtcagcccatgagattgtattcgacgtgtttgtatcatccaaatgctccacagtgtttgagtcatatgaacagcggatgcactttcaccagtccccacctagcccagcgggtggcctcgacggtgtaccagaattgtgagcatgctgacaactatacggcatactgcctcggaattagccacatggagccaagcttcgggctgattctgcatgacggtggaactacacttaaattcgtggacactcctgagtcgcttagcgggttgtacgtgtttgtagtgtatttcaatggtcatgttgaggcagtggcttataccgttgtcagcactgttgatcattttgtgaacgccattgaggagcgggggttcccgcctacggctgggcaaccccccgctacgactaagcccaaagagattacaccagtgaaccctggcacaagccccctgattaggtatgctgcctggacaggcgggcttgctgccgtggtgttgctgtgtctagtcatctttttgatctgcactgccaagcggatgcgggtcaaggcttatcgggttgacaagtctccgtataatcagtcgatgtattacgcaggccttcctgtggatgattttgaggactctgagtccacagacaccgaggaggagtttggtaatgctattggcggtagtcacggggggtcgtcatatacagtgtatatcgacaagactcgg

SEQ ID NO: 185 - RNA, 1869 nt, synthetic construct
  source 1..1869: mol_type = other RNA
atggggactgttaataagccagttgtgggagttctgatggggttcggtatcatcactgggactctcaggattaccaatcctgttcgcgcctctgttttacgctatgatgactttcatattgatgaggataagctcgacacaaactctgtgtacgagccttattatcatagcgatcatgcagagtcgtcatgggtaaataggggtgagagttcccgcaaggcttatgatcataacagtccttatatctggccaagaaatgattacgatggtttcttggagaatgcccatgagcatcatggtgtttacaaccagggtcggggtatcgactctggcgagagattgatgcaaccgacccaaatgagtgcgcaggaggacctaggcgatgataccgggattcacgtgattcctactctgaatggcgacgacagacacaagattgtcaatgttgatcagcggcagtacggggatgtgttcaagggtgacctcaatccgaagcctcaggggcagaggctcattgaggtttcggttgaggagaatcatccttttacactccgtgctcctattcagaggatttacggggtccggtatacagagacctggtcttttctgccgtcacttacttgcactggtgacgctgcccctgctattcagcatatatgccttaagcatacaacttgttttcaggatgtggtggtggatgttgattgcgctgagaataccaaggaagatcagcttgccgaaatttcttacagatttcagggcaaaaaggaagctgatcaaccttggattgttgtcaatacatccacgctttttgacgagctggagctcgatcccccggaaatcgagcctggcgtgttgaaggtgctgcgtactgagaagcaatatcttggggtgtatatctggaatatgcgggggtcggacggcaccagtacctatgccactttcctcgtgacgtggaagggcgacgagaagactcggaatcccacgccggctgtgaccccacagccgcgtggggccgagtttcacatgtggaattatcattctcacgtgttctctgtgggcgacacgttcagtttggccatgcaccttcagtacaagatacacgaagccccttttgatcttctgctcgaatggctgtatgtgccaattgacccgacgtgtcagcccatgagattatactctacgtgtttatatcatccaaatgctccacagtgtttgagtcatatgaacagtgggtgtacgttcacaagtccccacctagcccagcgggtggcctcgacggtgtaccagaattgtgagcatgctgacaactatacggcatactgcctcggaattagccacatggagccaagcttcgggctgattctgcatgacggtggaactacacttaaattcgtggacactcctgagtcgcttagcgggttgtacgtgtttgtagtgtatttcaatggtcatgttgaggcagtggcttataccgttgtcagcactgttgatcattttgtgaacgccattgaggagcgggggttcccgcctacggctgggcaaccccccgctacgactaagcctaaggaaattaccccggtgaatccaggtacctcgcctcttatcaggtatgcagcctggaccggtggtctggctgcagtcgtgctactatgcctcgtgattttcttgatctgcactgctaaacgcatgcgtgtcaaggcttatagggtggataaatccccctataaccagtctatgtactatgctggccttcctgtggacgacttcgaggattcggagtcgaccgatacagaggaggagtttggcaatgcgatcggggggagtcacgggggtagtagctacactgtgtatatcgataagacgagg

SEQ ID NO: 186 - RNA, 1869 nt, synthetic construct
  source 1..1869: mol_type = other RNA
atggggactgttaataagcctgtggtcggagtgttgatggggtttgggatcatcaccgggacattgaggatcacgaatcctgttcgtgcctcggtgttgcggtacgatgatttccacatagatgaggataagttggataccaattccgtttatgagccctattaccactctgaccacgccgaatcatcttgggtgaaccggggtgagtcttcgcgcaaggcttatgatcataattctccatacatatggccaagaaatgattatgatggtttcctggagaatgcccatgagcatcatggcgtttataaccaaggtcggggtatcgactctggcgagagattgatgcaaccgacccaaatgagtgcgcaggaggacctaggcgatgataccgggattcacgtgattcctactctgaatggcgacgacagacacaagattgtcaatgttgatcagcggcagtacggggatgtgttcaagggtgacctcaatccgaagcctcaggggcagaggctcattgaggtttcggttgaggagaatcatccttttacactccgtgctcctattcagaggatttacggggtccggtatacagagacctggtcttttctgccgtcacttacttgcactggtgacgctgcccctgctattcagcatatatgccttaagcatacaacttgttttcaggatgtggtggtggatgttgattgcgctgagaataccaaggaagatcagcttgccgaaatttcttacagatttcagggcaaaaaggaagctgatcaaccttggattgttgtcaatacatccacgctttttgacgagctggagctcgatcccccggaaatcgagcctggcgtgttgaaggtgctgcgtactgagaagcaatatcttggggtgtatatctggaatatgcgggggtcggacggcaccagtacctatgccactttcctcgtgacgtggaagggcgacgagaagactcggaatcccacgccggctgtgaccccacagccgcgtggggccgagtttcacatgtggaattatcattctcacgtgttctctgtgggcgacacgttcagtttggccatgcaccttcagtacaagatacacgaagccccttttgatcttctgctcgaatggctgtatgtgccaattgacccgacgtgtcagcccatgagattatactctacgtgtttatatcatccaaatgctccacagtgtttgagtcatatgaacagtgggtgtacgttcacaagtcctcatctagcgcagcgcgtggcttccactgtctatcagaactgtgagcacgcagacaactatacagcctactgtctggggattagccacatggagccaagctttgggctgattcttcacgacggtggcaccacacttaagttcgtggacactcccgagtctttaagtgggttgtatgtttttgtggtttatttcaatggacacgtggaagccgtggcttacactgtggtgagtactgtggatcacttcgtgaatgccatcgaggagcgggggtttcctcctacggcaggacagccccccgcgaccacaaagcccaaagagattacaccagtgaaccctggcacaagccccctgattaggtatgctgcctggacaggcgggcttgctgccgtggtgttgctgtgtctagtcatctttttgatctgcactgccaagcggatgcgggtcaaggcttatcgggttgacaagtctccgtataatcagtcgatgtattacgcaggccttcctgtggatgattttgaggactctgagtccacagacaccgaggaggagtttggtaatgctattggcggtagtcacggggggtcgtcatatacagtgtatatcgacaagactcgg

SEQ ID NO: 187 - RNA, 1869 nt, synthetic construct
  source 1..1869: mol_type = other RNA
atggggactgttaataagcctgtggtcggagtgttgatggggtttgggatcatcaccgggacattgaggatcacgaatcctgttcgtgcctcggtgttgcggtacgatgatttccacatagatgaggataagttggataccaattccgtttatgagccctattaccactctgaccacgccgaatcatcttgggtgaaccggggtgagtcttcgcgcaaggcttatgatcataattctccatacatatggccaagaaatgattatgatggtttcctggagaatgcccatgagcatcatggcgtttataaccaaggcagggggattgattctggagagcgtcttatgcagcctacccagatgtccgcccaggaggacctgggtgatgacactgggatccatgtgattccaactcttaatggtgacgatcgccataagattgtgaacgtggatcagaggcagtatggggacgtttttaagggcgatctcaatcctaagccgcagggacagaggctgatcgaggtttctgtggaggagaaccatccctttaccttgcgggctccaatccaaaggatctatggagtgaggtacacagaaacttggtcatttctgccctcgcttacctgcactggagatgctgctcccgctattcaacatatctgtctcaagcacaccacgtgcttccaggatgtggttgtagacgtcgattgcgctgagaataccaaggaggatcagctggctgagatcagttaccgcttccaggggaagaaggaagctgatcagccttggattgttgtgaatacgtctacactgtttgacgagcttgaactggaccctccagaaatcgagccaggtgtgttgaaagtgttgaggactgagaaacagtaccttggagtgtatatctggaatatgagaggttccgacgggacctctacatatgccactttcctcgtgacgtggaagggcgacgagaagactcggaatcccacgccggctgtgaccccacagccgcgtggggccgagtttcacatgtggaattatcattctcacgtgttctctgtgggcgacacgttcagtttggccatgcaccttcagtacaagatacacgaagccccttttgatcttctgctcgaatggctgtatgtgccaattgacccgacgtgtcagcccatgagattatactctacgtgtttatatcatccaaatgctccacagtgtttgagtcatatgaacagtgggtgtacgttcacaagtccccacctagcccagcgggtggcctcgacggtgtaccagaattgtgagcatgctgacaactatacggcatactgcctcggaattagccacatggagccaagcttcgggctgattctgcatgacggtggaactacacttaaattcgtggacactcctgagtcgcttagcgggttgtacgtgtttgtagtgtatttcaatggtcatgttgaggcagtggcttataccgttgtcagcactgttgatcattttgtgaacgccattgaggagcgggggttcccgcctacggctgggcaaccccccgctacgactaagcctaaggaaattaccccggtgaatccaggtacctcgcctcttatcaggtatgcagcctggaccggtggtctggctgcagtcgtgctactatgcctcgtgattttcttgatctgcactgctaaacgcatgcgtgtcaaggcttatagggtggataaatccccctataaccagtctatgtactatgctggccttcctgtggacgacttcgaggattcggagtcgaccgatacagaggaggagtttggcaatgcgatcggggggagtcacgggggtagtagctacactgtgtatatcgataagacgagg

SEQ ID NO: 188 - RNA, 1869 nt, synthetic construct
  source 1..1869: mol_type = other RNA
atggggactgttaataagccagttgtgggagttctgatggggttcggtatcatcactgggactctcaggattaccaatcctgttcgcgcctctgttttacgctatgatgactttcatattgatgaggataagctcgacacaaactctgtgtacgagccttattatcatagcgatcatgcagagtcgtcatgggtaaataggggtgagagttcccgcaaggcttatgatcataacagtccttatatctggccaagaaatgattacgatggtttcttggagaatgcccatgagcatcatggtgtttacaaccagggcagggggattgattctggagagcgtcttatgcagcctacccagatgtccgcccaggaggacctgggtgatgacactgggatccatgtgattccaactcttaatggtgacgatcgccataagattgtgaacgtggatcagaggcagtatggggacgtttttaagggcgatctcaatcctaagccgcagggacagaggctgatcgaggtttctgtggaggagaaccatccctttaccttgcgggctccaatccaaaggatctatggagtgaggtacacagaaacttggtcatttctgccctcgcttacctgcactggtgacgctgcccctgctattcagcatatatgccttaagcatacaacttgttttcaggatgtggtggtggatgttgattgcgctgagaataccaaggaagatcagcttgccgaaatttcttacagatttcagggcaaaaaggaagctgatcaaccttggattgttgtcaatacatccacgctttttgacgagctggagctcgatcccccggaaatcgagcctggcgtgttgaaggtgctgcgtactgagaagcaatatcttggggtgtatatctggaatatgcgggggtcggacggcaccagtacctatgccacctttctagtaacctggaagggtgacgagaagacccggaaccccacccctgctgtgactccgcagcctaggggtgcggagttccacatgtggaattaccattcccatgtgttttccgtgggtgatacgttcagtctggctatgcacctccagtataagatacacgaagctccttttgatcttctactggaatggctgtatgtgccgattgaccctacgtgtcagcccatgagattgtattcgacgtgtttgtatcatccaaatgctccacagtgtttgagtcatatgaacagcggatgcactttcaccagtcctcatctagcgcagcgcgtggcttccactgtctatcagaactgtgagcacgcagacaactatacagcctactgtctggggattagccacatggagccaagctttgggctgattcttcacgacggtggcaccacacttaagttcgtggacactcccgagtctttaagtgggttgtatgtttttgtggtttatttcaatggacacgtggaagccgtggcttacactgtggtgagtactgtggatcacttcgtgaatgccatcgaggagcgggggtttcctcctacggcaggacagccccccgcgaccacaaagcctaaggaaattaccccggtgaatccaggtacctcgcctcttatcaggtatgcagcctggaccggtggtctggctgcagtcgtgctactatgcctcgtgattttcttgatctgcactgctaaacgcatgcgtgtcaaggcttatagggtggataaatccccctataaccagtctatgtactatgctggccttcctgtggacgacttcgaggattcggagtcgaccgatacagaggaggagtttggcaatgcgatcggggggagtcacgggggtagtagctacactgtgtatatcgataagacgagg

SEQ ID NO: 189 - RNA, 1869 nt, synthetic construct
  source 1..1869: mol_type = other RNA
atggggactgttaataagccagttgtgggagttctgatggggttcggtatcatcactgggactctcaggattaccaatcctgttcgcgcctctgttttacgctatgatgactttcatattgatgaggataagctcgacacaaactctgtgtacgagccttattatcatagcgatcatgcagagtcgtcatgggtaaataggggtgagagttcccgcaaggcttatgatcataacagtccttatatctggccaagaaatgattacgatggtttcttggagaatgcccatgagcatcatggtgtttacaaccagggtcggggtatcgactctggcgagagattgatgcaaccgacccaaatgagtgcgcaggaggacctaggcgatgataccgggattcacgtgattcctactctgaatggcgacgacagacacaagattgtcaatgttgatcagcggcagtacggggatgtgttcaagggtgacctcaatccgaagcctcaggggcagaggctcattgaggtttcggttgaggagaatcatccttttacactccgtgctcctattcagaggatttacggggtccggtatacagagacctggtcttttctgccgtcacttacttgcactggagatgctgctcccgctattcaacatatctgtctcaagcacaccacgtgcttccaggatgtggttgtagacgtcgattgcgctgagaataccaaggaggatcagctggctgagatcagttaccgcttccaggggaagaaggaagctgatcagccttggattgttgtgaatacgtctacactgtttgacgagcttgaactggaccctccagaaatcgagccaggtgtgttgaaagtgttgaggactgagaaacagtaccttggagtgtatatctggaatatgagaggttccgacgggacctctacatatgccacctttctagtaacctggaagggtgacgagaagacccggaaccccacccctgctgtgactccgcagcctaggggtgcggagttccacatgtggaattaccattcccatgtgttttccgtgggtgatacgttcagtctggctatgcacctccagtataagatacacgaagctccttttgatcttctactggaatggctgtatgtgccgattgaccctacgtgtcagcccatgagattgtattcgacgtgtttgtatcatccaaatgctccacagtgtttgagtcatatgaacagcggatgcactttcaccagtccccacctagcccagcgggtggcctcgacggtgtaccagaattgtgagcatgctgacaactatacggcatactgcctcggaattagccacatggagccaagcttcgggctgattctgcatgacggtggaactacacttaaattcgtggacactcctgagtcgcttagcgggttgtacgtgtttgtagtgtatttcaatggtcatgttgaggcagtggcttataccgttgtcagcactgttgatcattttgtgaacgccattgaggagcgggggttcccgcctacggctgggcaaccccccgctacgactaagcctaaggaaattaccccggtgaatccaggtacctcgcctcttatcaggtatgcagcctggaccggtggtctggctgcagtcgtgctactatgcctcgtgattttcttgatctgcactgctaaacgcatgcgtgtcaaggcttatagggtggataaatccccctataaccagtctatgtactatgctggccttcctgtggacgacttcgaggattcggagtcgaccgatacagaggaggagtttggcaatgcgatcggggggagtcacgggggtagtagctacactgtgtatatcgataagacgagg

SEQ ID NO: 190 - RNA, 1869 nt, synthetic construct
  source 1..1869: mol_type = other RNA
atggggactgttaataagccagttgtgggagttctgatggggttcggtatcatcactgggactctcaggattaccaatcctgttcgcgcctctgttttacgctatgatgactttcatattgatgaggataagctcgacacaaactctgtgtacgagccttattatcatagcgatcatgcagagtcgtcatgggtaaataggggtgagagttcccgcaaggcttatgatcataacagtccttatatctggccaagaaatgattacgatggtttcttggagaatgcccatgagcatcatggtgtttacaaccagggcagggggattgattctggagagcgtcttatgcagcctacccagatgtccgcccaggaggacctgggtgatgacactgggatccatgtgattccaactcttaatggtgacgatcgccataagattgtgaacgtggatcagaggcagtatggggacgtttttaagggcgatctcaatcctaagccgcagggacagaggctgatcgaggtttctgtggaggagaaccatccctttaccttgcgggctccaatccaaaggatctatggagtgaggtacacagaaacttggtcatttctgccctcgcttacctgcactggagatgctgctcccgctattcaacatatctgtctcaagcacaccacgtgcttccaggatgtggttgtagacgtcgattgcgctgagaataccaaggaggatcagctggctgagatcagttaccgcttccaggggaagaaggaagctgatcagccttggattgttgtgaatacgtctacactgtttgacgagcttgaactggaccctccagaaatcgagccaggtgtgttgaaagtgttgaggactgagaaacagtaccttggagtgtatatctggaatatgagaggttccgacgggacctctacatatgccactttcctcgtgacgtggaagggcgacgagaagactcggaatcccacgccggctgtgaccccacagccgcgtggggccgagtttcacatgtggaattatcattctcacgtgttctctgtgggcgacacgttcagtttggccatgcaccttcagtacaagatacacgaagccccttttgatcttctgctcgaatggctgtatgtgccaattgacccgacgtgtcagcccatgagattatactctacgtgtttatatcatccaaatgctccacagtgtttgagtcatatgaacagtgggtgtacgttcacaagtccccacctagcccagcgggtggcctcgacggtgtaccagaattgtgagcatgctgacaactatacggcatactgcctcggaattagccacatggagccaagcttcgggctgattctgcatgacggtggaactacacttaaattcgtggacactcctgagtcgcttagcgggttgtacgtgtttgtagtgtatttcaatggtcatgttgaggcagtggcttataccgttgtcagcactgttgatcattttgtgaacgccattgaggagcgggggttcccgcctacggctgggcaaccccccgctacgactaagcccaaagagattacaccagtgaaccctggcacaagccccctgattaggtatgctgcctggacaggcgggcttgctgccgtggtgttgctgtgtctagtcatctttttgatctgcactgccaagcggatgcgggtcaaggcttatcgggttgacaagtctccgtataatcagtcgatgtattacgcaggccttcctgtggatgattttgaggactctgagtccacagacaccgaggaggagtttggtaatgctattggcggtagtcacggggggtcgtcatatacagtgtatatcgacaagactcgg

SEQ ID NO: 191 - RNA, 1869 nt, synthetic construct
  source 1..1869: mol_type = other RNA
atggggactgttaataagcctgtggtcggagtgttgatggggtttgggatcatcaccgggacattgaggatcacgaatcctgttcgtgcctcggtgttgcggtacgatgatttccacatagatgaggataagttggataccaattccgtttatgagccctattaccactctgaccacgccgaatcatcttgggtgaaccggggtgagtcttcgcgcaaggcttatgatcataattctccatacatatggccaagaaatgattatgatggtttcctggagaatgcccatgagcatcatggcgtttataaccaaggtcggggtatcgactctggcgagagattgatgcaaccgacccaaatgagtgcgcaggaggacctaggcgatgataccgggattcacgtgattcctactctgaatggcgacgacagacacaagattgtcaatgttgatcagcggcagtacggggatgtgttcaagggtgacctcaatccgaagcctcaggggcagaggctcattgaggtttcggttgaggagaatcatccttttacactccgtgctcctattcagaggatttacggggtccggtatacagagacctggtcttttctgccgtcacttacttgcactggagatgctgctcccgctattcaacatatctgtctcaagcacaccacgtgcttccaggatgtggttgtagacgtcgattgcgctgagaataccaaggaggatcagctggctgagatcagttaccgcttccaggggaagaaggaagctgatcagccttggattgttgtgaatacgtctacactgtttgacgagcttgaactggaccctccagaaatcgagccaggtgtgttgaaagtgttgaggactgagaaacagtaccttggagtgtatatctggaatatgagaggttccgacgggacctctacatatgccacctttctagtaacctggaagggtgacgagaagacccggaaccccacccctgctgtgactccgcagcctaggggtgcggagttccacatgtggaattaccattcccatgtgttttccgtgggtgatacgttcagtctggctatgcacctccagtataagatacacgaagctccttttgatcttctactggaatggctgtatgtgccgattgaccctacgtgtcagcccatgagattgtattcgacgtgtttgtatcatccaaatgctccacagtgtttgagtcatatgaacagcggatgcactttcaccagtccccacctagcccagcgggtggcctcgacggtgtaccagaattgtgagcatgctgacaactatacggcatactgcctcggaattagccacatggagccaagcttcgggctgattctgcatgacggtggaactacacttaaattcgtggacactcctgagtcgcttagcgggttgtacgtgtttgtagtgtatttcaatggtcatgttgaggcagtggcttataccgttgtcagcactgttgatcattttgtgaacgccattgaggagcgggggttcccgcctacggctgggcaaccccccgctacgactaagcccaaagagattacaccagtgaaccctggcacaagccccctgattaggtatgctgcctggacaggcgggcttgctgccgtggtgttgctgtgtctagtcatctttttgatctgcactgccaagcggatgcgggtcaaggcttatcgggttgacaagtctccgtataatcagtcgatgtattacgcaggccttcctgtggatgattttgaggactctgagtccacagacaccgaggaggagtttggtaatgctattggcggtagtcacggggggtcgtcatatacagtgtatatcgacaagactcgg

SEQ ID NO: 192 - RNA, 1869 nt, synthetic construct
  source 1..1869: mol_type = other RNA
atggggactgttaataagcctgtggtcggagtgttgatggggtttgggatcatcaccgggacattgaggatcacgaatcctgttcgtgcctcggtgttgcggtacgatgatttccacatagatgaggataagttggataccaattccgtttatgagccctattaccactctgaccacgccgaatcatcttgggtgaaccggggtgagtcttcgcgcaaggcttatgatcataattctccatacatatggccaagaaatgattatgatggtttcctggagaatgcccatgagcatcatggcgtttataaccaaggcagggggattgattctggagagcgtcttatgcagcctacccagatgtccgcccaggaggacctgggtgatgacactgggatccatgtgattccaactcttaatggtgacgatcgccataagattgtgaacgtggatcagaggcagtatggggacgtttttaagggcgatctcaatcctaagccgcagggacagaggctgatcgaggtttctgtggaggagaaccatccctttaccttgcgggctccaatccaaaggatctatggagtgaggtacacagaaacttggtcatttctgccctcgcttacctgcactggagatgctgctcccgctattcaacatatctgtctcaagcacaccacgtgcttccaggatgtggttgtagacgtcgattgcgctgagaataccaaggaggatcagctggctgagatcagttaccgcttccaggggaagaaggaagctgatcagccttggattgttgtgaatacgtctacactgtttgacgagcttgaactggaccctccagaaatcgagccaggtgtgttgaaagtgttgaggactgagaaacagtaccttggagtgtatatctggaatatgagaggttccgacgggacctctacatatgccacctttctagtaacctggaagggtgacgagaagacccggaaccccacccctgctgtgactccgcagcctaggggtgcggagttccacatgtggaattaccattcccatgtgttttccgtgggtgatacgttcagtctggctatgcacctccagtataagatacacgaagctccttttgatcttctactggaatggctgtatgtgccgattgaccctacgtgtcagcccatgagattgtattcgacgtgtttgtatcatccaaatgctccacagtgtttgagtcatatgaacagcggatgcactttcaccagtcctcatctagcgcagcgcgtggcttccactgtctatcagaactgtgagcacgcagacaactatacagcctactgtctggggattagccacatggagccaagctttgggctgattcttcacgacggtggcaccacacttaagttcgtggacactcccgagtctttaagtgggttgtatgtttttgtggtttatttcaatggacacgtggaagccgtggcttacactgtggtgagtactgtggatcacttcgtgaatgccatcgaggagcgggggtttcctcctacggcaggacagccccccgcgaccacaaagcctaaggaaattaccccggtgaatccaggtacctcgcctcttatcaggtatgcagcctggaccggtggtctggctgcagtcgtgctactatgcctcgtgattttcttgatctgcactgctaaacgcatgcgtgtcaaggcttatagggtggataaatccccctataaccagtctatgtactatgctggccttcctgtggacgacttcgaggattcggagtcgaccgatacagaggaggagtttggcaatgcgatcggggggagtcacgggggtagtagctacactgtgtatatcgataagacgagg

SEQ ID NO: 193 - RNA, 1869 nt, synthetic construct
  source 1..1869: mol_type = other RNA
atggggactgttaataagccagttgtgggagttctgatggggttcggtatcatcactgggactctcaggattaccaatcctgttcgcgcctctgttttacgctatgatgactttcatattgatgaggataagctcgacacaaactctgtgtacgagccttattatcatagcgatcatgcagagtcgtcatgggtaaataggggtgagagttcccgcaaggcttatgatcataacagtccttatatctggccaagaaatgattacgatggtttcttggagaatgcccatgagcatcatggtgtttacaaccagggtcggggtatcgactctggcgagagattgatgcaaccgacccaaatgagtgcgcaggaggacctaggcgatgataccgggattcacgtgattcctactctgaatggcgacgacagacacaagattgtcaatgttgatcagcggcagtacggggatgtgttcaagggtgacctcaatccgaagcctcaggggcagaggctcattgaggtttcggttgaggagaatcatccttttacactccgtgctcctattcagaggatttacggggtccggtatacagagacctggtcttttctgccgtcacttacttgcactggagatgctgctcccgctattcaacatatctgtctcaagcacaccacgtgcttccaggatgtggttgtagacgtcgattgcgctgagaataccaaggaggatcagctggctgagatcagttaccgcttccaggggaagaaggaagctgatcagccttggattgttgtgaatacgtctacactgtttgacgagcttgaactggaccctccagaaatcgagccaggtgtgttgaaagtgttgaggactgagaaacagtaccttggagtgtatatctggaatatgagaggttccgacgggacctctacatatgccacctttctagtaacctggaagggtgacgagaagacccggaaccccacccctgctgtgactccgcagcctaggggtgcggagttccacatgtggaattaccattcccatgtgttttccgtgggtgatacgttcagtctggctatgcacctccagtataagatacacgaagctccttttgatcttctactggaatggctgtatgtgccgattgaccctacgtgtcagcccatgagattgtattcgacgtgtttgtatcatccaaatgctccacagtgtttgagtcatatgaacagcggatgcactttcaccagtccccacctagcccagcgggtggcctcgacggtgtaccagaattgtgagcatgctgacaactatacggcatactgcctcggaattagccacatggagccaagcttcgggctgattctgcatgacggtggaactacacttaaattcgtggacactcctgagtcgcttagcgggttgtacgtgtttgtagtgtatttcaatggtcatgttgaggcagtggcttataccgttgtcagcactgttgatcattttgtgaacgccattgaggagcgggggttcccgcctacggctgggcaaccccccgctacgactaagcccaaagagattacaccagtgaaccctggcacaagccccctgattaggtatgctgcctggacaggcgggcttgctgccgtggtgttgctgtgtctagtcatctttttgatctgcactgccaagcggatgcgggtcaaggcttatcgggttgacaagtctccgtataatcagtcgatgtattacgcaggccttcctgtggatgattttgaggactctgagtccacagacaccgaggaggagtttggtaatgctattggcggtagtcacggggggtcgtcatatacagtgtatatcgacaagactcgg

SEQ ID NO: 194 - RNA, 1869 nt, synthetic construct
  source 1..1869: mol_type = other RNA
atggggactgttaataagccagttgtgggagttctgatggggttcggtatcatcactgggactctcaggattaccaatcctgttcgcgcctctgttttacgctatgatgactttcatattgatgaggataagctcgacacaaactctgtgtacgagccttattatcatagcgatcatgcagagtcgtcatgggtaaataggggtgagagttcccgcaaggcttatgatcataacagtccttatatctggccaagaaatgattacgatggtttcttggagaatgcccatgagcatcatggtgtttacaaccagggtcggggtatcgactctggcgagagattgatgcaaccgacccaaatgagtgcgcaggaggacctaggcgatgataccgggattcacgtgattcctactctgaatggcgacgacagacacaagattgtcaatgttgatcagcggcagtacggggatgtgttcaagggtgacctcaatccgaagcctcaggggcagaggctcattgaggtttcggttgaggagaatcatccttttacactccgtgctcctattcagaggatttacggggtccggtatacagagacctggtcttttctgccgtcacttacttgcactggtgacgctgcccctgctattcagcatatatgccttaagcatacaacttgttttcaggatgtggtggtggatgttgattgcgctgagaataccaaggaagatcagcttgccgaaatttcttacagatttcagggcaaaaaggaagctgatcaaccttggattgttgtcaatacatccacgctttttgacgagctggagctcgatcccccggaaatcgagcctggcgtgttgaaggtgctgcgtactgagaagcaatatcttggggtgtatatctggaatatgcgggggtcggacggcaccagtacctatgccacctttctagtaacctggaagggtgacgagaagacccggaaccccacccctgctgtgactccgcagcctaggggtgcggagttccacatgtggaattaccattcccatgtgttttccgtgggtgatacgttcagtctggctatgcacctccagtataagatacacgaagctccttttgatcttctactggaatggctgtatgtgccgattgaccctacgtgtcagcccatgagattgtattcgacgtgtttgtatcatccaaatgctccacagtgtttgagtcatatgaacagcggatgcactttcaccagtccccacctagcccagcgggtggcctcgacggtgtaccagaattgtgagcatgctgacaactatacggcatactgcctcggaattagccacatggagccaagcttcgggctgattctgcatgacggtggaactacacttaaattcgtggacactcctgagtcgcttagcgggttgtacgtgtttgtagtgtatttcaatggtcatgttgaggcagtggcttataccgttgtcagcactgttgatcattttgtgaacgccattgaggagcgggggttcccgcctacggctgggcaaccccccgctacgactaagcccaaagagattacaccagtgaaccctggcacaagccccctgattaggtatgctgcctggacaggcgggcttgctgccgtggtgttgctgtgtctagtcatctttttgatctgcactgccaagcggatgcgggtcaaggcttatcgggttgacaagtctccgtataatcagtcgatgtattacgcaggccttcctgtggatgattttgaggactctgagtccacagacaccgaggaggagtttggtaatgctattggcggtagtcacggggggtcgtcatatacagtgtatatcgacaagactcgg

SEQ ID NO: 195 - RNA, 1869 nt, synthetic construct
  source 1..1869: mol_type = other RNA
atggggactgttaataagcctgtggtcggagtgttgatggggtttgggatcatcaccgggacattgaggatcacgaatcctgttcgtgcctcggtgttgcggtacgatgatttccacatagatgaggataagttggataccaattccgtttatgagccctattaccactctgaccacgccgaatcatcttgggtgaaccggggtgagtcttcgcgcaaggcttatgatcataattctccatacatatggccaagaaatgattatgatggtttcctggagaatgcccatgagcatcatggcgtttataaccaaggtcggggtatcgactctggcgagagattgatgcaaccgacccaaatgagtgcgcaggaggacctaggcgatgataccgggattcacgtgattcctactctgaatggcgacgacagacacaagattgtcaatgttgatcagcggcagtacggggatgtgttcaagggtgacctcaatccgaagcctcaggggcagaggctcattgaggtttcggttgaggagaatcatccttttacactccgtgctcctattcagaggatttacggggtccggtatacagagacctggtcttttctgccgtcacttacttgcactggtgacgctgcccctgctattcagcatatatgccttaagcatacaacttgttttcaggatgtggtggtggatgttgattgcgctgagaataccaaggaagatcagcttgccgaaatttcttacagatttcagggcaaaaaggaagctgatcaaccttggattgttgtcaatacatccacgctttttgacgagctggagctcgatcccccggaaatcgagcctggcgtgttgaaggtgctgcgtactgagaagcaatatcttggggtgtatatctggaatatgcgggggtcggacggcaccagtacctatgccactttcctcgtgacgtggaagggcgacgagaagactcggaatcccacgccggctgtgaccccacagccgcgtggggccgagtttcacatgtggaattatcattctcacgtgttctctgtgggcgacacgttcagtttggccatgcaccttcagtacaagatacacgaagccccttttgatcttctgctcgaatggctgtatgtgccaattgacccgacgtgtcagcccatgagattatactctacgtgtttatatcatccaaatgctccacagtgtttgagtcatatgaacagtgggtgtacgttcacaagtccccacctagcccagcgggtggcctcgacggtgtaccagaattgtgagcatgctgacaactatacggcatactgcctcggaattagccacatggagccaagcttcgggctgattctgcatgacggtggaactacacttaaattcgtggacactcctgagtcgcttagcgggttgtacgtgtttgtagtgtatttcaatggtcatgttgaggcagtggcttataccgttgtcagcactgttgatcattttgtgaacgccattgaggagcgggggttcccgcctacggctgggcaaccccccgctacgactaagcctaaggaaattaccccggtgaatccaggtacctcgcctcttatcaggtatgcagcctggaccggtggtctggctgcagtcgtgctactatgcctcgtgattttcttgatctgcactgctaaacgcatgcgtgtcaaggcttatagggtggataaatccccctataaccagtctatgtactatgctggccttcctgtggacgacttcgaggattcggagtcgaccgatacagaggaggagtttggcaatgcgatcggggggagtcacgggggtagtagctacactgtgtatatcgataagacgagg

SEQ ID NO: 196 - RNA, 1869 nt, synthetic construct
  source 1..1869: mol_type = other RNA
atggggactgttaataagccagttgtgggagttctgatggggttcggtatcatcactgggactctcaggattaccaatcctgttcgcgcctctgttttacgctatgatgactttcatattgatgaggataagctcgacacaaactctgtgtacgagccttattatcatagcgatcatgcagagtcgtcatgggtaaataggggtgagagttcccgcaaggcttatgatcataacagtccttatatctggccaagaaatgattacgatggtttcttggagaatgcccatgagcatcatggtgtttacaaccagggcagggggattgattctggagagcgtcttatgcagcctacccagatgtccgcccaggaggacctgggtgatgacactgggatccatgtgattccaactcttaatggtgacgatcgccataagattgtgaacgtggatcagaggcagtatggggacgtttttaagggcgatctcaatcctaagccgcagggacagaggctgatcgaggtttctgtggaggagaaccatccctttaccttgcgggctccaatccaaaggatctatggagtgaggtacacagaaacttggtcatttctgccctcgcttacctgcactggtgacgctgcccctgctattcagcatatatgccttaagcatacaacttgttttcaggatgtggtggtggatgttgattgcgctgagaataccaaggaagatcagcttgccgaaatttcttacagatttcagggcaaaaaggaagctgatcaaccttggattgttgtcaatacatccacgctttttgacgagctggagctcgatcccccggaaatcgagcctggcgtgttgaaggtgctgcgtactgagaagcaatatcttggggtgtatatctggaatatgcgggggtcggacggcaccagtacctatgccacctttctagtaacctggaagggtgacgagaagacccggaaccccacccctgctgtgactccgcagcctaggggtgcggagttccacatgtggaattaccattcccatgtgttttccgtgggtgatacgttcagtctggctatgcacctccagtataagatacacgaagctccttttgatcttctactggaatggctgtatgtgccgattgaccctacgtgtcagcccatgagattgtattcgacgtgtttgtatcatccaaatgctccacagtgtttgagtcatatgaacagcggatgcactttcaccagtccccacctagcccagcgggtggcctcgacggtgtaccagaattgtgagcatgctgacaactatacggcatactgcctcggaattagccacatggagccaagcttcgggctgattctgcatgacggtggaactacacttaaattcgtggacactcctgagtcgcttagcgggttgtacgtgtttgtagtgtatttcaatggtcatgttgaggcagtggcttataccgttgtcagcactgttgatcattttgtgaacgccattgaggagcgggggttcccgcctacggctgggcaaccccccgctacgactaagcctaaggaaattaccccggtgaatccaggtacctcgcctcttatcaggtatgcagcctggaccggtggtctggctgcagtcgtgctactatgcctcgtgattttcttgatctgcactgctaaacgcatgcgtgtcaaggcttatagggtggataaatccccctataaccagtctatgtactatgctggccttcctgtggacgacttcgaggattcggagtcgaccgatacagaggaggagtttggcaatgcgatcggggggagtcacgggggtagtagctacactgtgtatatcgataagacgagg

SEQ ID NO: 197 - RNA, 1869 nt, synthetic construct
  source 1..1869: mol_type = other RNA
atggggactgttaataagcctgtggtcggagtgttgatggggtttgggatcatcaccgggacattgaggatcacgaatcctgttcgtgcctcggtgttgcggtacgatgatttccacatagatgaggataagttggataccaattccgtttatgagccctattaccactctgaccacgccgaatcatcttgggtgaaccggggtgagtcttcgcgcaaggcttatgatcataattctccatacatatggccaagaaatgattatgatggtttcctggagaatgcccatgagcatcatggcgtttataaccaaggcagggggattgattctggagagcgtcttatgcagcctacccagatgtccgcccaggaggacctgggtgatgacactgggatccatgtgattccaactcttaatggtgacgatcgccataagattgtgaacgtggatcagaggcagtatggggacgtttttaagggcgatctcaatcctaagccgcagggacagaggctgatcgaggtttctgtggaggagaaccatccctttaccttgcgggctccaatccaaaggatctatggagtgaggtacacagaaacttggtcatttctgccctcgcttacctgcactggtgacgctgcccctgctattcagcatatatgccttaagcatacaacttgttttcaggatgtggtggtggatgttgattgcgctgagaataccaaggaagatcagcttgccgaaatttcttacagatttcagggcaaaaaggaagctgatcaaccttggattgttgtcaatacatccacgctttttgacgagctggagctcgatcccccggaaatcgagcctggcgtgttgaaggtgctgcgtactgagaagcaatatcttggggtgtatatctggaatatgcgggggtcggacggcaccagtacctatgccacctttctagtaacctggaagggtgacgagaagacccggaaccccacccctgctgtgactccgcagcctaggggtgcggagttccacatgtggaattaccattcccatgtgttttccgtgggtgatacgttcagtctggctatgcacctccagtataagatacacgaagctccttttgatcttctactggaatggctgtatgtgccgattgaccctacgtgtcagcccatgagattgtattcgacgtgtttgtatcatccaaatgctccacagtgtttgagtcatatgaacagcggatgcactttcaccagtccccacctagcccagcgggtggcctcgacggtgtaccagaattgtgagcatgctgacaactatacggcatactgcctcggaattagccacatggagccaagcttcgggctgattctgcatgacggtggaactacacttaaattcgtggacactcctgagtcgcttagcgggttgtacgtgtttgtagtgtatttcaatggtcatgttgaggcagtggcttataccgttgtcagcactgttgatcattttgtgaacgccattgaggagcgggggttcccgcctacggctgggcaaccccccgctacgactaagcccaaagagattacaccagtgaaccctggcacaagccccctgattaggtatgctgcctggacaggcgggcttgctgccgtggtgttgctgtgtctagtcatctttttgatctgcactgccaagcggatgcgggtcaaggcttatcgggttgacaagtctccgtataatcagtcgatgtattacgcaggccttcctgtggatgattttgaggactctgagtccacagacaccgaggaggagtttggtaatgctattggcggtagtcacggggggtcgtcatatacagtgtatatcgacaagactcgg

SEQ ID NO: 198 - RNA, 1869 nt, synthetic construct
  source 1..1869: mol_type = other RNA
atggggactgttaataagcctgtggtcggagtgttgatggggtttgggatcatcaccgggacattgaggatcacgaatcctgttcgtgcctcggtgttgcggtacgatgatttccacatagatgaggataagttggataccaattccgtttatgagccctattaccactctgaccacgccgaatcatcttgggtgaaccggggtgagtcttcgcgcaaggcttatgatcataattctccatacatatggccaagaaatgattatgatggtttcctggagaatgcccatgagcatcatggcgtttataaccaaggtcggggtatcgactctggcgagagattgatgcaaccgacccaaatgagtgcgcaggaggacctaggcgatgataccgggattcacgtgattcctactctgaatggcgacgacagacacaagattgtcaatgttgatcagcggcagtacggggatgtgttcaagggtgacctcaatccgaagcctcaggggcagaggctcattgaggtttcggttgaggagaatcatccttttacactccgtgctcctattcagaggatttacggggtccggtatacagagacctggtcttttctgccgtcacttacttgcactggtgacgctgcccctgctattcagcatatatgccttaagcatacaacttgttttcaggatgtggtggtggatgttgattgcgctgagaataccaaggaagatcagcttgccgaaatttcttacagatttcagggcaaaaaggaagctgatcaaccttggattgttgtcaatacatccacgctttttgacgagctggagctcgatcccccggaaatcgagcctggcgtgttgaaggtgctgcgtactgagaagcaatatcttggggtgtatatctggaatatgcgggggtcggacggcaccagtacctatgccacctttctagtaacctggaagggtgacgagaagacccggaaccccacccctgctgtgactccgcagcctaggggtgcggagttccacatgtggaattaccattcccatgtgttttccgtgggtgatacgttcagtctggctatgcacctccagtataagatacacgaagctccttttgatcttctactggaatggctgtatgtgccgattgaccctacgtgtcagcccatgagattgtattcgacgtgtttgtatcatccaaatgctccacagtgtttgagtcatatgaacagcggatgcactttcaccagtcctcatctagcgcagcgcgtggcttccactgtctatcagaactgtgagcacgcagacaactatacagcctactgtctggggattagccacatggagccaagctttgggctgattcttcacgacggtggcaccacacttaagttcgtggacactcccgagtctttaagtgggttgtatgtttttgtggtttatttcaatggacacgtggaagccgtggcttacactgtggtgagtactgtggatcacttcgtgaatgccatcgaggagcgggggtttcctcctacggcaggacagccccccgcgaccacaaagcccaaagagattacaccagtgaaccctggcacaagccccctgattaggtatgctgcctggacaggcgggcttgctgccgtggtgttgctgtgtctagtcatctttttgatctgcactgccaagcggatgcgggtcaaggcttatcgggttgacaagtctccgtataatcagtcgatgtattacgcaggccttcctgtggatgattttgaggactctgagtccacagacaccgaggaggagtttggtaatgctattggcggtagtcacggggggtcgtcatatacagtgtatatcgacaagactcgg

SEQ ID NO: 199 - RNA, 1869 nt, synthetic construct
  source 1..1869: mol_type = other RNA
atggggactgttaataagccagttgtgggagttctgatggggttcggtatcatcactgggactctcaggattaccaatcctgttcgcgcctctgttttacgctatgatgactttcatattgatgaggataagctcgacacaaactctgtgtacgagccttattatcatagcgatcatgcagagtcgtcatgggtaaataggggtgagagttcccgcaaggcttatgatcataacagtccttatatctggccaagaaatgattacgatggtttcttggagaatgcccatgagcatcatggtgtttacaaccagggcagggggattgattctggagagcgtcttatgcagcctacccagatgtccgcccaggaggacctgggtgatgacactgggatccatgtgattccaactcttaatggtgacgatcgccataagattgtgaacgtggatcagaggcagtatggggacgtttttaagggcgatctcaatcctaagccgcagggacagaggctgatcgaggtttctgtggaggagaaccatccctttaccttgcgggctccaatccaaaggatctatggagtgaggtacacagaaacttggtcatttctgccctcgcttacctgcactggagatgctgctcccgctattcaacatatctgtctcaagcacaccacgtgcttccaggatgtggttgtagacgtcgattgcgctgagaataccaaggaggatcagctggctgagatcagttaccgcttccaggggaagaaggaagctgatcagccttggattgttgtgaatacgtctacactgtttgacgagcttgaactggaccctccagaaatcgagccaggtgtgttgaaagtgttgaggactgagaaacagtaccttggagtgtatatctggaatatgagaggttccgacgggacctctacatatgccacctttctagtaacctggaagggtgacgagaagacccggaaccccacccctgctgtgactccgcagcctaggggtgcggagttccacatgtggaattaccattcccatgtgttttccgtgggtgatacgttcagtctggctatgcacctccagtataagatacacgaagctccttttgatcttctactggaatggctgtatgtgccgattgaccctacgtgtcagcccatgagattgtattcgacgtgtttgtatcatccaaatgctccacagtgtttgagtcatatgaacagcggatgcactttcaccagtcctcatctagcgcagcgcgtggcttccactgtctatcagaactgtgagcacgcagacaactatacagcctactgtctggggattagccacatggagccaagctttgggctgattcttcacgacggtggcaccacacttaagttcgtggacactcccgagtctttaagtgggttgtatgtttttgtggtttatttcaatggacacgtggaagccgtggcttacactgtggtgagtactgtggatcacttcgtgaatgccatcgaggagcgggggtttcctcctacggcaggacagccccccgcgaccacaaagcccaaagagattacaccagtgaaccctggcacaagccccctgattaggtatgctgcctggacaggcgggcttgctgccgtggtgttgctgtgtctagtcatctttttgatctgcactgccaagcggatgcgggtcaaggcttatcgggttgacaagtctccgtataatcagtcgatgtattacgcaggccttcctgtggatgattttgaggactctgagtccacagacaccgaggaggagtttggtaatgctattggcggtagtcacggggggtcgtcatatacagtgtatatcgacaagactcgg

SEQ ID NO: 200 - RNA, 1869 nt, synthetic construct
  source 1..1869: mol_type = other RNA
atggggactgttaataagcctgtggtcggagtgttgatggggtttgggatcatcaccgggacattgaggatcacgaatcctgttcgtgcctcggtgttgcggtacgatgatttccacatagatgaggataagttggataccaattccgtttatgagccctattaccactctgaccacgccgaatcatcttgggtgaaccggggtgagtcttcgcgcaaggcttatgatcataattctccatacatatggccaagaaatgattatgatggtttcctggagaatgcccatgagcatcatggcgtttataaccaaggtcggggtatcgactctggcgagagattgatgcaaccgacccaaatgagtgcgcaggaggacctaggcgatgataccgggattcacgtgattcctactctgaatggcgacgacagacacaagattgtcaatgttgatcagcggcagtacggggatgtgttcaagggtgacctcaatccgaagcctcaggggcagaggctcattgaggtttcggttgaggagaatcatccttttacactccgtgctcctattcagaggatttacggggtccggtatacagagacctggtcttttctgccgtcacttacttgcactggagatgctgctcccgctattcaacatatctgtctcaagcacaccacgtgcttccaggatgtggttgtagacgtcgattgcgctgagaataccaaggaggatcagctggctgagatcagttaccgcttccaggggaagaaggaagctgatcagccttggattgttgtgaatacgtctacactgtttgacgagcttgaactggaccctccagaaatcgagccaggtgtgttgaaagtgttgaggactgagaaacagtaccttggagtgtatatctggaatatgagaggttccgacgggacctctacatatgccactttcctcgtgacgtggaagggcgacgagaagactcggaatcccacgccggctgtgaccccacagccgcgtggggccgagtttcacatgtggaattatcattctcacgtgttctctgtgggcgacacgttcagtttggccatgcaccttcagtacaagatacacgaagccccttttgatcttctgctcgaatggctgtatgtgccaattgacccgacgtgtcagcccatgagattatactctacgtgtttatatcatccaaatgctccacagtgtttgagtcatatgaacagtgggtgtacgttcacaagtccccacctagcccagcgggtggcctcgacggtgtaccagaattgtgagcatgctgacaactatacggcatactgcctcggaattagccacatggagccaagcttcgggctgattctgcatgacggtggaactacacttaaattcgtggacactcctgagtcgcttagcgggttgtacgtgtttgtagtgtatttcaatggtcatgttgaggcagtggcttataccgttgtcagcactgttgatcattttgtgaacgccattgaggagcgggggttcccgcctacggctgggcaaccccccgctacgactaagcccaaagagattacaccagtgaaccctggcacaagccccctgattaggtatgctgcctggacaggcgggcttgctgccgtggtgttgctgtgtctagtcatctttttgatctgcactgccaagcggatgcgggtcaaggcttatcgggttgacaagtctccgtataatcagtcgatgtattacgcaggccttcctgtggatgattttgaggactctgagtccacagacaccgaggaggagtttggtaatgctattggcggtagtcacggggggtcgtcatatacagtgtatatcgacaagactcgg

SEQ ID NO: 201 - RNA, 1869 nt, synthetic construct
  source 1..1869: mol_type = other RNA
atggggactgttaataagccagttgtgggagttctgatggggttcggtatcatcactgggactctcaggattaccaatcctgttcgcgcctctgttttacgctatgatgactttcatattgatgaggataagctcgacacaaactctgtgtacgagccttattatcatagcgatcatgcagagtcgtcatgggtaaataggggtgagagttcccgcaaggcttatgatcataacagtccttatatctggccaagaaatgattacgatggtttcttggagaatgcccatgagcatcatggtgtttacaaccagggcagggggattgattctggagagcgtcttatgcagcctacccagatgtccgcccaggaggacctgggtgatgacactgggatccatgtgattccaactcttaatggtgacgatcgccataagattgtgaacgtggatcagaggcagtatggggacgtttttaagggcgatctcaatcctaagccgcagggacagaggctgatcgaggtttctgtggaggagaaccatccctttaccttgcgggctccaatccaaaggatctatggagtgaggtacacagaaacttggtcatttctgccctcgcttacctgcactggagatgctgctcccgctattcaacatatctgtctcaagcacaccacgtgcttccaggatgtggttgtagacgtcgattgcgctgagaataccaaggaggatcagctggctgagatcagttaccgcttccaggggaagaaggaagctgatcagccttggattgttgtgaatacgtctacactgtttgacgagcttgaactggaccctccagaaatcgagccaggtgtgttgaaagtgttgaggactgagaaacagtaccttggagtgtatatctggaatatgagaggttccgacgggacctctacatatgccactttcctcgtgacgtggaagggcgacgagaagactcggaatcccacgccggctgtgaccccacagccgcgtggggccgagtttcacatgtggaattatcattctcacgtgttctctgtgggcgacacgttcagtttggccatgcaccttcagtacaagatacacgaagccccttttgatcttctgctcgaatggctgtatgtgccaattgacccgacgtgtcagcccatgagattatactctacgtgtttatatcatccaaatgctccacagtgtttgagtcatatgaacagtgggtgtacgttcacaagtccccacctagcccagcgggtggcctcgacggtgtaccagaattgtgagcatgctgacaactatacggcatactgcctcggaattagccacatggagccaagcttcgggctgattctgcatgacggtggaactacacttaaattcgtggacactcctgagtcgcttagcgggttgtacgtgtttgtagtgtatttcaatggtcatgttgaggcagtggcttataccgttgtcagcactgttgatcattttgtgaacgccattgaggagcgggggttcccgcctacggctgggcaaccccccgctacgactaagcctaaggaaattaccccggtgaatccaggtacctcgcctcttatcaggtatgcagcctggaccggtggtctggctgcagtcgtgctactatgcctcgtgattttcttgatctgcactgctaaacgcatgcgtgtcaaggcttatagggtggataaatccccctataaccagtctatgtactatgctggccttcctgtggacgacttcgaggattcggagtcgaccgatacagaggaggagtttggcaatgcgatcggggggagtcacgggggtagtagctacactgtgtatatcgataagacgagg

SEQ ID NO: 202 - RNA, 1869 nt, synthetic construct
  source 1..1869: mol_type = other RNA
atggggactgttaataagccagttgtgggagttctgatggggttcggtatcatcactgggactctcaggattaccaatcctgttcgcgcctctgttttacgctatgatgactttcatattgatgaggataagctcgacacaaactctgtgtacgagccttattatcatagcgatcatgcagagtcgtcatgggtaaataggggtgagagttcccgcaaggcttatgatcataacagtccttatatctggccaagaaatgattacgatggtttcttggagaatgcccatgagcatcatggtgtttacaaccagggcagggggattgattctggagagcgtcttatgcagcctacccagatgtccgcccaggaggacctgggtgatgacactgggatccatgtgattccaactcttaatggtgacgatcgccataagattgtgaacgtggatcagaggcagtatggggacgtttttaagggcgatctcaatcctaagccgcagggacagaggctgatcgaggtttctgtggaggagaaccatccctttaccttgcgggctccaatccaaaggatctatggagtgaggtacacagaaacttggtcatttctgccctcgcttacctgcactggagatgctgctcccgctattcaacatatctgtctcaagcacaccacgtgcttccaggatgtggttgtagacgtcgattgcgctgagaataccaaggaggatcagctggctgagatcagttaccgcttccaggggaagaaggaagctgatcagccttggattgttgtgaatacgtctacactgtttgacgagcttgaactggaccctccagaaatcgagccaggtgtgttgaaagtgttgaggactgagaaacagtaccttggagtgtatatctggaatatgagaggttccgacgggacctctacatatgccacctttctagtaacctggaagggtgacgagaagacccggaaccccacccctgctgtgactccgcagcctaggggtgcggagttccacatgtggaattaccattcccatgtgttttccgtgggtgatacgttcagtctggctatgcacctccagtataagatacacgaagctccttttgatcttctactggaatggctgtatgtgccgattgaccctacgtgtcagcccatgagattgtattcgacgtgtttgtatcatccaaatgctccacagtgtttgagtcatatgaacagcggatgcactttcaccagtccccacctagcccagcgggtggcctcgacggtgtaccagaattgtgagcatgctgacaactatacggcatactgcctcggaattagccacatggagccaagcttcgggctgattctgcatgacggtggaactacacttaaattcgtggacactcctgagtcgcttagcgggttgtacgtgtttgtagtgtatttcaatggtcatgttgaggcagtggcttataccgttgtcagcactgttgatcattttgtgaacgccattgaggagcgggggttcccgcctacggctgggcaaccccccgctacgactaagcctaaggaaattaccccggtgaatccaggtacctcgcctcttatcaggtatgcagcctggaccggtggtctggctgcagtcgtgctactatgcctcgtgattttcttgatctgcactgctaaacgcatgcgtgtcaaggcttatagggtggataaatccccctataaccagtctatgtactatgctggccttcctgtggacgacttcgaggattcggagtcgaccgatacagaggaggagtttggcaatgcgatcggggggagtcacgggggtagtagctacactgtgtatatcgataagacgagg

SEQ ID NO: 203 - RNA, 1869 nt, synthetic construct
  source 1..1869: mol_type = other RNA
atggggactgttaataagcctgtggtcggagtgttgatggggtttgggatcatcaccgggacattgaggatcacgaatcctgttcgtgcctcggtgttgcggtacgatgatttccacatagatgaggataagttggataccaattccgtttatgagccctattaccactctgaccacgccgaatcatcttgggtgaaccggggtgagtcttcgcgcaaggcttatgatcataattctccatacatatggccaagaaatgattatgatggtttcctggagaatgcccatgagcatcatggcgtttataaccaaggtcggggtatcgactctggcgagagattgatgcaaccgacccaaatgagtgcgcaggaggacctaggcgatgataccgggattcacgtgattcctactctgaatggcgacgacagacacaagattgtcaatgttgatcagcggcagtacggggatgtgttcaagggtgacctcaatccgaagcctcaggggcagaggctcattgaggtttcggttgaggagaatcatccttttacactccgtgctcctattcagaggatttacggggtccggtatacagagacctggtcttttctgccgtcacttacttgcactggagatgctgctcccgctattcaacatatctgtctcaagcacaccacgtgcttccaggatgtggttgtagacgtcgattgcgctgagaataccaaggaggatcagctggctgagatcagttaccgcttccaggggaagaaggaagctgatcagccttggattgttgtgaatacgtctacactgtttgacgagcttgaactggaccctccagaaatcgagccaggtgtgttgaaagtgttgaggactgagaaacagtaccttggagtgtatatctggaatatgagaggttccgacgggacctctacatatgccactttcctcgtgacgtggaagggcgacgagaagactcggaatcccacgccggctgtgaccccacagccgcgtggggccgagtttcacatgtggaattatcattctcacgtgttctctgtgggcgacacgttcagtttggccatgcaccttcagtacaagatacacgaagccccttttgatcttctgctcgaatggctgtatgtgccaattgacccgacgtgtcagcccatgagattatactctacgtgtttatatcatccaaatgctccacagtgtttgagtcatatgaacagtgggtgtacgttcacaagtccccacctagcccagcgggtggcctcgacggtgtaccagaattgtgagcatgctgacaactatacggcatactgcctcggaattagccacatggagccaagcttcgggctgattctgcatgacggtggaactacacttaaattcgtggacactcctgagtcgcttagcgggttgtacgtgtttgtagtgtatttcaatggtcatgttgaggcagtggcttataccgttgtcagcactgttgatcattttgtgaacgccattgaggagcgggggttcccgcctacggctgggcaaccccccgctacgactaagcctaaggaaattaccccggtgaatccaggtacctcgcctcttatcaggtatgcagcctggaccggtggtctggctgcagtcgtgctactatgcctcgtgattttcttgatctgcactgctaaacgcatgcgtgtcaaggcttatagggtggataaatccccctataaccagtctatgtactatgctggccttcctgtggacgacttcgaggattcggagtcgaccgatacagaggaggagtttggcaatgcgatcggggggagtcacgggggtagtagctacactgtgtatatcgataagacgagg

SEQ ID NO: 204 - RNA, 1869 nt, synthetic construct
  source 1..1869: mol_type = other RNA
atggggactgttaataagccagttgtgggagttctgatggggttcggtatcatcactgggactctcaggattaccaatcctgttcgcgcctctgttttacgctatgatgactttcatattgatgaggataagctcgacacaaactctgtgtacgagccttattatcatagcgatcatgcagagtcgtcatgggtaaataggggtgagagttcccgcaaggcttatgatcataacagtccttatatctggccaagaaatgattacgatggtttcttggagaatgcccatgagcatcatggtgtttacaaccagggtcggggtatcgactctggcgagagattgatgcaaccgacccaaatgagtgcgcaggaggacctaggcgatgataccgggattcacgtgattcctactctgaatggcgacgacagacacaagattgtcaatgttgatcagcggcagtacggggatgtgttcaagggtgacctcaatccgaagcctcaggggcagaggctcattgaggtttcggttgaggagaatcatccttttacactccgtgctcctattcagaggatttacggggtccggtatacagagacctggtcttttctgccgtcacttacttgcactggtgacgctgcccctgctattcagcatatatgccttaagcatacaacttgttttcaggatgtggtggtggatgttgattgcgctgagaataccaaggaagatcagcttgccgaaatttcttacagatttcagggcaaaaaggaagctgatcaaccttggattgttgtcaatacatccacgctttttgacgagctggagctcgatcccccggaaatcgagcctggcgtgttgaaggtgctgcgtactgagaagcaatatcttggggtgtatatctggaatatgcgggggtcggacggcaccagtacctatgccacctttctagtaacctggaagggtgacgagaagacccggaaccccacccctgctgtgactccgcagcctaggggtgcggagttccacatgtggaattaccattcccatgtgttttccgtgggtgatacgttcagtctggctatgcacctccagtataagatacacgaagctccttttgatcttctactggaatggctgtatgtgccgattgaccctacgtgtcagcccatgagattgtattcgacgtgtttgtatcatccaaatgctccacagtgtttgagtcatatgaacagcggatgcactttcaccagtcctcatctagcgcagcgcgtggcttccactgtctatcagaactgtgagcacgcagacaactatacagcctactgtctggggattagccacatggagccaagctttgggctgattcttcacgacggtggcaccacacttaagttcgtggacactcccgagtctttaagtgggttgtatgtttttgtggtttatttcaatggacacgtggaagccgtggcttacactgtggtgagtactgtggatcacttcgtgaatgccatcgaggagcgggggtttcctcctacggcaggacagccccccgcgaccacaaagcctaaggaaattaccccggtgaatccaggtacctcgcctcttatcaggtatgcagcctggaccggtggtctggctgcagtcgtgctactatgcctcgtgattttcttgatctgcactgctaaacgcatgcgtgtcaaggcttatagggtggataaatccccctataaccagtctatgtactatgctggccttcctgtggacgacttcgaggattcggagtcgaccgatacagaggaggagtttggcaatgcgatcggggggagtcacgggggtagtagctacactgtgtatatcgataagacgagg

SEQ ID NO: 205 - RNA, 1869 nt, synthetic construct
  source 1..1869: mol_type = other RNA
atggggactgttaataagcctgtggtcggagtgttgatggggtttgggatcatcaccgggacattgaggatcacgaatcctgttcgtgcctcggtgttgcggtacgatgatttccacatagatgaggataagttggataccaattccgtttatgagccctattaccactctgaccacgccgaatcatcttgggtgaaccggggtgagtcttcgcgcaaggcttatgatcataattctccatacatatggccaagaaatgattatgatggtttcctggagaatgcccatgagcatcatggcgtttataaccaaggcagggggattgattctggagagcgtcttatgcagcctacccagatgtccgcccaggaggacctgggtgatgacactgggatccatgtgattccaactcttaatggtgacgatcgccataagattgtgaacgtggatcagaggcagtatggggacgtttttaagggcgatctcaatcctaagccgcagggacagaggctgatcgaggtttctgtggaggagaaccatccctttaccttgcgggctccaatccaaaggatctatggagtgaggtacacagaaacttggtcatttctgccctcgcttacctgcactggagatgctgctcccgctattcaacatatctgtctcaagcacaccacgtgcttccaggatgtggttgtagacgtcgattgcgctgagaataccaaggaggatcagctggctgagatcagttaccgcttccaggggaagaaggaagctgatcagccttggattgttgtgaatacgtctacactgtttgacgagcttgaactggaccctccagaaatcgagccaggtgtgttgaaagtgttgaggactgagaaacagtaccttggagtgtatatctggaatatgagaggttccgacgggacctctacatatgccacctttctagtaacctggaagggtgacgagaagacccggaaccccacccctgctgtgactccgcagcctaggggtgcggagttccacatgtggaattaccattcccatgtgttttccgtgggtgatacgttcagtctggctatgcacctccagtataagatacacgaagctccttttgatcttctactggaatggctgtatgtgccgattgaccctacgtgtcagcccatgagattgtattcgacgtgtttgtatcatccaaatgctccacagtgtttgagtcatatgaacagcggatgcactttcaccagtccccacctagcccagcgggtggcctcgacggtgtaccagaattgtgagcatgctgacaactatacggcatactgcctcggaattagccacatggagccaagcttcgggctgattctgcatgacggtggaactacacttaaattcgtggacactcctgagtcgcttagcgggttgtacgtgtttgtagtgtatttcaatggtcatgttgaggcagtggcttataccgttgtcagcactgttgatcattttgtgaacgccattgaggagcgggggttcccgcctacggctgggcaaccccccgctacgactaagcctaaggaaattaccccggtgaatccaggtacctcgcctcttatcaggtatgcagcctggaccggtggtctggctgcagtcgtgctactatgcctcgtgattttcttgatctgcactgctaaacgcatgcgtgtcaaggcttatagggtggataaatccccctataaccagtctatgtactatgctggccttcctgtggacgacttcgaggattcggagtcgaccgatacagaggaggagtttggcaatgcgatcggggggagtcacgggggtagtagctacactgtgtatatcgataagacgagg

SEQ ID NO: 206 - RNA, 1869 nt, synthetic construct
  source 1..1869: mol_type = other RNA
atggggactgttaataagcctgtggtcggagtgttgatggggtttgggatcatcaccgggacattgaggatcacgaatcctgttcgtgcctcggtgttgcggtacgatgatttccacatagatgaggataagttggataccaattccgtttatgagccctattaccactctgaccacgccgaatcatcttgggtgaaccggggtgagtcttcgcgcaaggcttatgatcataattctccatacatatggccaagaaatgattatgatggtttcctggagaatgcccatgagcatcatggcgtttataaccaaggcagggggattgattctggagagcgtcttatgcagcctacccagatgtccgcccaggaggacctgggtgatgacactgggatccatgtgattccaactcttaatggtgacgatcgccataagattgtgaacgtggatcagaggcagtatggggacgtttttaagggcgatctcaatcctaagccgcagggacagaggctgatcgaggtttctgtggaggagaaccatccctttaccttgcgggctccaatccaaaggatctatggagtgaggtacacagaaacttggtcatttctgccctcgcttacctgcactggagatgctgctcccgctattcaacatatctgtctcaagcacaccacgtgcttccaggatgtggttgtagacgtcgattgcgctgagaataccaaggaggatcagctggctgagatcagttaccgcttccaggggaagaaggaagctgatcagccttggattgttgtgaatacgtctacactgtttgacgagcttgaactggaccctccagaaatcgagccaggtgtgttgaaagtgttgaggactgagaaacagtaccttggagtgtatatctggaatatgagaggttccgacgggacctctacatatgccacctttctagtaacctggaagggtgacgagaagacccggaaccccacccctgctgtgactccgcagcctaggggtgcggagttccacatgtggaattaccattcccatgtgttttccgtgggtgatacgttcagtctggctatgcacctccagtataagatacacgaagctccttttgatcttctactggaatggctgtatgtgccgattgaccctacgtgtcagcccatgagattgtattcgacgtgtttgtatcatccaaatgctccacagtgtttgagtcatatgaacagcggatgcactttcaccagtcctcatctagcgcagcgcgtggcttccactgtctatcagaactgtgagcacgcagacaactatacagcctactgtctggggattagccacatggagccaagctttgggctgattcttcacgacggtggcaccacacttaagttcgtggacactcccgagtctttaagtgggttgtatgtttttgtggtttatttcaatggacacgtggaagccgtggcttacactgtggtgagtactgtggatcacttcgtgaatgccatcgaggagcgggggtttcctcctacggcaggacagccccccgcgaccacaaagcccaaagagattacaccagtgaaccctggcacaagccccctgattaggtatgctgcctggacaggcgggcttgctgccgtggtgttgctgtgtctagtcatctttttgatctgcactgccaagcggatgcgggtcaaggcttatcgggttgacaagtctccgtataatcagtcgatgtattacgcaggccttcctgtggatgattttgaggactctgagtccacagacaccgaggaggagtttggtaatgctattggcggtagtcacggggggtcgtcatatacagtgtatatcgacaagactcgg

SEQ ID NO: 207 - RNA, 1869 nt, synthetic construct
  source 1..1869: mol_type = other RNA
atggggactgttaataagcctgtggtcggagtgttgatggggtttgggatcatcaccgggacattgaggatcacgaatcctgttcgtgcctcggtgttgcggtacgatgatttccacatagatgaggataagttggataccaattccgtttatgagccctattaccactctgaccacgccgaatcatcttgggtgaaccggggtgagtcttcgcgcaaggcttatgatcataattctccatacatatggccaagaaatgattatgatggtttcctggagaatgcccatgagcatcatggcgtttataaccaaggtcggggtatcgactctggcgagagattgatgcaaccgacccaaatgagtgcgcaggaggacctaggcgatgataccgggattcacgtgattcctactctgaatggcgacgacagacacaagattgtcaatgttgatcagcggcagtacggggatgtgttcaagggtgacctcaatccgaagcctcaggggcagaggctcattgaggtttcggttgaggagaatcatccttttacactccgtgctcctattcagaggatttacggggtccggtatacagagacctggtcttttctgccgtcacttacttgcactggtgacgctgcccctgctattcagcatatatgccttaagcatacaacttgttttcaggatgtggtggtggatgttgattgcgctgagaataccaaggaagatcagcttgccgaaatttcttacagatttcagggcaaaaaggaagctgatcaaccttggattgttgtcaatacatccacgctttttgacgagctggagctcgatcccccggaaatcgagcctggcgtgttgaaggtgctgcgtactgagaagcaatatcttggggtgtatatctggaatatgcgggggtcggacggcaccagtacctatgccactttcctcgtgacgtggaagggcgacgagaagactcggaatcccacgccggctgtgaccccacagccgcgtggggccgagtttcacatgtggaattatcattctcacgtgttctctgtgggcgacacgttcagtttggccatgcaccttcagtacaagatacacgaagccccttttgatcttctgctcgaatggctgtatgtgccaattgacccgacgtgtcagcccatgagattatactctacgtgtttatatcatccaaatgctccacagtgtttgagtcatatgaacagtgggtgtacgttcacaagtcctcatctagcgcagcgcgtggcttccactgtctatcagaactgtgagcacgcagacaactatacagcctactgtctggggattagccacatggagccaagctttgggctgattcttcacgacggtggcaccacacttaagttcgtggacactcccgagtctttaagtgggttgtatgtttttgtggtttatttcaatggacacgtggaagccgtggcttacactgtggtgagtactgtggatcacttcgtgaatgccatcgaggagcgggggtttcctcctacggcaggacagccccccgcgaccacaaagcctaaggaaattaccccggtgaatccaggtacctcgcctcttatcaggtatgcagcctggaccggtggtctggctgcagtcgtgctactatgcctcgtgattttcttgatctgcactgctaaacgcatgcgtgtcaaggcttatagggtggataaatccccctataaccagtctatgtactatgctggccttcctgtggacgacttcgaggattcggagtcgaccgatacagaggaggagtttggcaatgcgatcggggggagtcacgggggtagtagctacactgtgtatatcgataagacgagg

SEQ ID NO: 208 - RNA, 1869 nt, synthetic construct
  source 1..1869: mol_type = other RNA
atggggactgttaataagcctgtggtcggagtgttgatggggtttgggatcatcaccgggacattgaggatcacgaatcctgttcgtgcctcggtgttgcggtacgatgatttccacatagatgaggataagttggataccaattccgtttatgagccctattaccactctgaccacgccgaatcatcttgggtgaaccggggtgagtcttcgcgcaaggcttatgatcataattctccatacatatggccaagaaatgattatgatggtttcctggagaatgcccatgagcatcatggcgtttataaccaaggcagggggattgattctggagagcgtcttatgcagcctacccagatgtccgcccaggaggacctgggtgatgacactgggatccatgtgattccaactcttaatggtgacgatcgccataagattgtgaacgtggatcagaggcagtatggggacgtttttaagggcgatctcaatcctaagccgcagggacagaggctgatcgaggtttctgtggaggagaaccatccctttaccttgcgggctccaatccaaaggatctatggagtgaggtacacagaaacttggtcatttctgccctcgcttacctgcactggtgacgctgcccctgctattcagcatatatgccttaagcatacaacttgttttcaggatgtggtggtggatgttgattgcgctgagaataccaaggaagatcagcttgccgaaatttcttacagatttcagggcaaaaaggaagctgatcaaccttggattgttgtcaatacatccacgctttttgacgagctggagctcgatcccccggaaatcgagcctggcgtgttgaaggtgctgcgtactgagaagcaatatcttggggtgtatatctggaatatgcgggggtcggacggcaccagtacctatgccacctttctagtaacctggaagggtgacgagaagacccggaaccccacccctgctgtgactccgcagcctaggggtgcggagttccacatgtggaattaccattcccatgtgttttccgtgggtgatacgttcagtctggctatgcacctccagtataagatacacgaagctccttttgatcttctactggaatggctgtatgtgccgattgaccctacgtgtcagcccatgagattgtattcgacgtgtttgtatcatccaaatgctccacagtgtttgagtcatatgaacagcggatgcactttcaccagtcctcatctagcgcagcgcgtggcttccactgtctatcagaactgtgagcacgcagacaactatacagcctactgtctggggattagccacatggagccaagctttgggctgattcttcacgacggtggcaccacacttaagttcgtggacactcccgagtctttaagtgggttgtatgtttttgtggtttatttcaatggacacgtggaagccgtggcttacactgtggtgagtactgtggatcacttcgtgaatgccatcgaggagcgggggtttcctcctacggcaggacagccccccgcgaccacaaagcctaaggaaattaccccggtgaatccaggtacctcgcctcttatcaggtatgcagcctggaccggtggtctggctgcagtcgtgctactatgcctcgtgattttcttgatctgcactgctaaacgcatgcgtgtcaaggcttatagggtggataaatccccctataaccagtctatgtactatgctggccttcctgtggacgacttcgaggattcggagtcgaccgatacagaggaggagtttggcaatgcgatcggggggagtcacgggggtagtagctacactgtgtatatcgataagacgagg

SEQ ID NO: 209 - RNA, 1869 nt, synthetic construct
  source 1..1869: mol_type = other RNA
atggggactgttaataagcctgtggtcggagtgttgatggggtttgggatcatcaccgggacattgaggatcacgaatcctgttcgtgcctcggtgttgcggtacgatgatttccacatagatgaggataagttggataccaattccgtttatgagccctattaccactctgaccacgccgaatcatcttgggtgaaccggggtgagtcttcgcgcaaggcttatgatcataattctccatacatatggccaagaaatgattatgatggtttcctggagaatgcccatgagcatcatggcgtttataaccaaggcagggggattgattctggagagcgtcttatgcagcctacccagatgtccgcccaggaggacctgggtgatgacactgggatccatgtgattccaactcttaatggtgacgatcgccataagattgtgaacgtggatcagaggcagtatggggacgtttttaagggcgatctcaatcctaagccgcagggacagaggctgatcgaggtttctgtggaggagaaccatccctttaccttgcgggctccaatccaaaggatctatggagtgaggtacacagaaacttggtcatttctgccctcgcttacctgcactggtgacgctgcccctgctattcagcatatatgccttaagcatacaacttgttttcaggatgtggtggtggatgttgattgcgctgagaataccaaggaagatcagcttgccgaaatttcttacagatttcagggcaaaaaggaagctgatcaaccttggattgttgtcaatacatccacgctttttgacgagctggagctcgatcccccggaaatcgagcctggcgtgttgaaggtgctgcgtactgagaagcaatatcttggggtgtatatctggaatatgcgggggtcggacggcaccagtacctatgccacctttctagtaacctggaagggtgacgagaagacccggaaccccacccctgctgtgactccgcagcctaggggtgcggagttccacatgtggaattaccattcccatgtgttttccgtgggtgatacgttcagtctggctatgcacctccagtataagatacacgaagctccttttgatcttctactggaatggctgtatgtgccgattgaccctacgtgtcagcccatgagattgtattcgacgtgtttgtatcatccaaatgctccacagtgtttgagtcatatgaacagcggatgcactttcaccagtccccacctagcccagcgggtggcctcgacggtgtaccagaattgtgagcatgctgacaactatacggcatactgcctcggaattagccacatggagccaagcttcgggctgattctgcatgacggtggaactacacttaaattcgtggacactcctgagtcgcttagcgggttgtacgtgtttgtagtgtatttcaatggtcatgttgaggcagtggcttataccgttgtcagcactgttgatcattttgtgaacgccattgaggagcgggggttcccgcctacggctgggcaaccccccgctacgactaagcctaaggaaattaccccggtgaatccaggtacctcgcctcttatcaggtatgcagcctggaccggtggtctggctgcagtcgtgctactatgcctcgtgattttcttgatctgcactgctaaacgcatgcgtgtcaaggcttatagggtggataaatccccctataaccagtctatgtactatgctggccttcctgtggacgacttcgaggattcggagtcgaccgatacagaggaggagtttggcaatgcgatcggggggagtcacgggggtagtagctacactgtgtatatcgataagacgagg

SEQ ID NO: 210 - RNA, 1869 nt, synthetic construct
  source 1..1869: mol_type = other RNA
atggggactgttaataagccagttgtgggagttctgatggggttcggtatcatcactgggactctcaggattaccaatcctgttcgcgcctctgttttacgctatgatgactttcatattgatgaggataagctcgacacaaactctgtgtacgagccttattatcatagcgatcatgcagagtcgtcatgggtaaataggggtgagagttcccgcaaggcttatgatcataacagtccttatatctggccaagaaatgattacgatggtttcttggagaatgcccatgagcatcatggtgtttacaaccagggcagggggattgattctggagagcgtcttatgcagcctacccagatgtccgcccaggaggacctgggtgatgacactgggatccatgtgattccaactcttaatggtgacgatcgccataagattgtgaacgtggatcagaggcagtatggggacgtttttaagggcgatctcaatcctaagccgcagggacagaggctgatcgaggtttctgtggaggagaaccatccctttaccttgcgggctccaatccaaaggatctatggagtgaggtacacagaaacttggtcatttctgccctcgcttacctgcactggagatgctgctcccgctattcaacatatctgtctcaagcacaccacgtgcttccaggatgtggttgtagacgtcgattgcgctgagaataccaaggaggatcagctggctgagatcagttaccgcttccaggggaagaaggaagctgatcagccttggattgttgtgaatacgtctacactgtttgacgagcttgaactggaccctccagaaatcgagccaggtgtgttgaaagtgttgaggactgagaaacagtaccttggagtgtatatctggaatatgagaggttccgacgggacctctacatatgccactttcctcgtgacgtggaagggcgacgagaagactcggaatcccacgccggctgtgaccccacagccgcgtggggccgagtttcacatgtggaattatcattctcacgtgttctctgtgggcgacacgttcagtttggccatgcaccttcagtacaagatacacgaagccccttttgatcttctgctcgaatggctgtatgtgccaattgacccgacgtgtcagcccatgagattatactctacgtgtttatatcatccaaatgctccacagtgtttgagtcatatgaacagtgggtgtacgttcacaagtcctcatctagcgcagcgcgtggcttccactgtctatcagaactgtgagcacgcagacaactatacagcctactgtctggggattagccacatggagccaagctttgggctgattcttcacgacggtggcaccacacttaagttcgtggacactcccgagtctttaagtgggttgtatgtttttgtggtttatttcaatggacacgtggaagccgtggcttacactgtggtgagtactgtggatcacttcgtgaatgccatcgaggagcgggggtttcctcctacggcaggacagccccccgcgaccacaaagcccaaagagattacaccagtgaaccctggcacaagccccctgattaggtatgctgcctggacaggcgggcttgctgccgtggtgttgctgtgtctagtcatctttttgatctgcactgccaagcggatgcgggtcaaggcttatcgggttgacaagtctccgtataatcagtcgatgtattacgcaggccttcctgtggatgattttgaggactctgagtccacagacaccgaggaggagtttggtaatgctattggcggtagtcacggggggtcgtcatatacagtgtatatcgacaagactcgg

SEQ ID NO: 211 - RNA, 1869 nt, synthetic construct
  source 1..1869: mol_type = other RNA
atggggactgttaataagccagttgtgggagttctgatggggttcggtatcatcactgggactctcaggattaccaatcctgttcgcgcctctgttttacgctatgatgactttcatattgatgaggataagctcgacacaaactctgtgtacgagccttattatcatagcgatcatgcagagtcgtcatgggtaaataggggtgagagttcccgcaaggcttatgatcataacagtccttatatctggccaagaaatgattacgatggtttcttggagaatgcccatgagcatcatggtgtttacaaccagggtcggggtatcgactctggcgagagattgatgcaaccgacccaaatgagtgcgcaggaggacctaggcgatgataccgggattcacgtgattcctactctgaatggcgacgacagacacaagattgtcaatgttgatcagcggcagtacggggatgtgttcaagggtgacctcaatccgaagcctcaggggcagaggctcattgaggtttcggttgaggagaatcatccttttacactccgtgctcctattcagaggatttacggggtccggtatacagagacctggtcttttctgccgtcacttacttgcactggagatgctgctcccgctattcaacatatctgtctcaagcacaccacgtgcttccaggatgtggttgtagacgtcgattgcgctgagaataccaaggaggatcagctggctgagatcagttaccgcttccaggggaagaaggaagctgatcagccttggattgttgtgaatacgtctacactgtttgacgagcttgaactggaccctccagaaatcgagccaggtgtgttgaaagtgttgaggactgagaaacagtaccttggagtgtatatctggaatatgagaggttccgacgggacctctacatatgccactttcctcgtgacgtggaagggcgacgagaagactcggaatcccacgccggctgtgaccccacagccgcgtggggccgagtttcacatgtggaattatcattctcacgtgttctctgtgggcgacacgttcagtttggccatgcaccttcagtacaagatacacgaagccccttttgatcttctgctcgaatggctgtatgtgccaattgacccgacgtgtcagcccatgagattatactctacgtgtttatatcatccaaatgctccacagtgtttgagtcatatgaacagtgggtgtacgttcacaagtccccacctagcccagcgggtggcctcgacggtgtaccagaattgtgagcatgctgacaactatacggcatactgcctcggaattagccacatggagccaagcttcgggctgattctgcatgacggtggaactacacttaaattcgtggacactcctgagtcgcttagcgggttgtacgtgtttgtagtgtatttcaatggtcatgttgaggcagtggcttataccgttgtcagcactgttgatcattttgtgaacgccattgaggagcgggggttcccgcctacggctgggcaaccccccgctacgactaagcctaaggaaattaccccggtgaatccaggtacctcgcctcttatcaggtatgcagcctggaccggtggtctggctgcagtcgtgctactatgcctcgtgattttcttgatctgcactgctaaacgcatgcgtgtcaaggcttatagggtggataaatccccctataaccagtctatgtactatgctggccttcctgtggacgacttcgaggattcggagtcgaccgatacagaggaggagtttggcaatgcgatcggggggagtcacgggggtagtagctacactgtgtatatcgataagacgagg

SEQ ID NO: 212 - RNA, 1869 nt, synthetic construct
  source 1..1869: mol_type = other RNA
atggggactgttaataagcctgtggtcggagtgttgatggggtttgggatcatcaccgggacattgaggatcacgaatcctgttcgtgcctcggtgttgcggtacgatgatttccacatagatgaggataagttggataccaattccgtttatgagccctattaccactctgaccacgccgaatcatcttgggtgaaccggggtgagtcttcgcgcaaggcttatgatcataattctccatacatatggccaagaaatgattatgatggtttcctggagaatgcccatgagcatcatggcgtttataaccaaggcagggggattgattctggagagcgtcttatgcagcctacccagatgtccgcccaggaggacctgggtgatgacactgggatccatgtgattccaactcttaatggtgacgatcgccataagattgtgaacgtggatcagaggcagtatggggacgtttttaagggcgatctcaatcctaagccgcagggacagaggctgatcgaggtttctgtggaggagaaccatccctttaccttgcgggctccaatccaaaggatctatggagtgaggtacacagaaacttggtcatttctgccctcgcttacctgcactggagatgctgctcccgctattcaacatatctgtctcaagcacaccacgtgcttccaggatgtggttgtagacgtcgattgcgctgagaataccaaggaggatcagctggctgagatcagttaccgcttccaggggaagaaggaagctgatcagccttggattgttgtgaatacgtctacactgtttgacgagcttgaactggaccctccagaaatcgagccaggtgtgttgaaagtgttgaggactgagaaacagtaccttggagtgtatatctggaatatgagaggttccgacgggacctctacatatgccactttcctcgtgacgtggaagggcgacgagaagactcggaatcccacgccggctgtgaccccacagccgcgtggggccgagtttcacatgtggaattatcattctcacgtgttctctgtgggcgacacgttcagtttggccatgcaccttcagtacaagatacacgaagccccttttgatcttctgctcgaatggctgtatgtgccaattgacccgacgtgtcagcccatgagattatactctacgtgtttatatcatccaaatgctccacagtgtttgagtcatatgaacagtgggtgtacgttcacaagtccccacctagcccagcgggtggcctcgacggtgtaccagaattgtgagcatgctgacaactatacggcatactgcctcggaattagccacatggagccaagcttcgggctgattctgcatgacggtggaactacacttaaattcgtggacactcctgagtcgcttagcgggttgtacgtgtttgtagtgtatttcaatggtcatgttgaggcagtggcttataccgttgtcagcactgttgatcattttgtgaacgccattgaggagcgggggttcccgcctacggctgggcaaccccccgctacgactaagcccaaagagattacaccagtgaaccctggcacaagccccctgattaggtatgctgcctggacaggcgggcttgctgccgtggtgttgctgtgtctagtcatctttttgatctgcactgccaagcggatgcgggtcaaggcttatcgggttgacaagtctccgtataatcagtcgatgtattacgcaggccttcctgtggatgattttgaggactctgagtccacagacaccgaggaggagtttggtaatgctattggcggtagtcacggggggtcgtcatatacagtgtatatcgacaagactcgg

SEQ ID NO: 213 - RNA, 1869 nt, synthetic construct
  source 1..1869: mol_type = other RNA
atggggactgttaataagccagttgtgggagttctgatggggttcggtatcatcactgggactctcaggattaccaatcctgttcgcgcctctgttttacgctatgatgactttcatattgatgaggataagctcgacacaaactctgtgtacgagccttattatcatagcgatcatgcagagtcgtcatgggtaaataggggtgagagttcccgcaaggcttatgatcataacagtccttatatctggccaagaaatgattacgatggtttcttggagaatgcccatgagcatcatggtgtttacaaccagggcagggggattgattctggagagcgtcttatgcagcctacccagatgtccgcccaggaggacctgggtgatgacactgggatccatgtgattccaactcttaatggtgacgatcgccataagattgtgaacgtggatcagaggcagtatggggacgtttttaagggcgatctcaatcctaagccgcagggacagaggctgatcgaggtttctgtggaggagaaccatccctttaccttgcgggctccaatccaaaggatctatggagtgaggtacacagaaacttggtcatttctgccctcgcttacctgcactggtgacgctgcccctgctattcagcatatatgccttaagcatacaacttgttttcaggatgtggtggtggatgttgattgcgctgagaataccaaggaagatcagcttgccgaaatttcttacagatttcagggcaaaaaggaagctgatcaaccttggattgttgtcaatacatccacgctttttgacgagctggagctcgatcccccggaaatcgagcctggcgtgttgaaggtgctgcgtactgagaagcaatatcttggggtgtatatctggaatatgcgggggtcggacggcaccagtacctatgccacctttctagtaacctggaagggtgacgagaagacccggaaccccacccctgctgtgactccgcagcctaggggtgcggagttccacatgtggaattaccattcccatgtgttttccgtgggtgatacgttcagtctggctatgcacctccagtataagatacacgaagctccttttgatcttctactggaatggctgtatgtgccgattgaccctacgtgtcagcccatgagattgtattcgacgtgtttgtatcatccaaatgctccacagtgtttgagtcatatgaacagcggatgcactttcaccagtcctcatctagcgcagcgcgtggcttccactgtctatcagaactgtgagcacgcagacaactatacagcctactgtctggggattagccacatggagccaagctttgggctgattcttcacgacggtggcaccacacttaagttcgtggacactcccgagtctttaagtgggttgtatgtttttgtggtttatttcaatggacacgtggaagccgtggcttacactgtggtgagtactgtggatcacttcgtgaatgccatcgaggagcgggggtttcctcctacggcaggacagccccccgcgaccacaaagcccaaagagattacaccagtgaaccctggcacaagccccctgattaggtatgctgcctggacaggcgggcttgctgccgtggtgttgctgtgtctagtcatctttttgatctgcactgccaagcggatgcgggtcaaggcttatcgggttgacaagtctccgtataatcagtcgatgtattacgcaggccttcctgtggatgattttgaggactctgagtccacagacaccgaggaggagtttggtaatgctattggcggtagtcacggggggtcgtcatatacagtgtatatcgacaagactcgg

SEQ ID NO: 214 - RNA, 1869 nt, synthetic construct
  source 1..1869: mol_type = other RNA
atggggactgttaataagcctgtggtcggagtgttgatggggtttgggatcatcaccgggacattgaggatcacgaatcctgttcgtgcctcggtgttgcggtacgatgatttccacatagatgaggataagttggataccaattccgtttatgagccctattaccactctgaccacgccgaatcatcttgggtgaaccggggtgagtcttcgcgcaaggcttatgatcataattctccatacatatggccaagaaatgattatgatggtttcctggagaatgcccatgagcatcatggcgtttataaccaaggtcggggtatcgactctggcgagagattgatgcaaccgacccaaatgagtgcgcaggaggacctaggcgatgataccgggattcacgtgattcctactctgaatggcgacgacagacacaagattgtcaatgttgatcagcggcagtacggggatgtgttcaagggtgacctcaatccgaagcctcaggggcagaggctcattgaggtttcggttgaggagaatcatccttttacactccgtgctcctattcagaggatttacggggtccggtatacagagacctggtcttttctgccgtcacttacttgcactggtgacgctgcccctgctattcagcatatatgccttaagcatacaacttgttttcaggatgtggtggtggatgttgattgcgctgagaataccaaggaagatcagcttgccgaaatttcttacagatttcagggcaaaaaggaagctgatcaaccttggattgttgtcaatacatccacgctttttgacgagctggagctcgatcccccggaaatcgagcctggcgtgttgaaggtgctgcgtactgagaagcaatatcttggggtgtatatctggaatatgcgggggtcggacggcaccagtacctatgccacctttctagtaacctggaagggtgacgagaagacccggaaccccacccctgctgtgactccgcagcctaggggtgcggagttccacatgtggaattaccattcccatgtgttttccgtgggtgatacgttcagtctggctatgcacctccagtataagatacacgaagctccttttgatcttctactggaatggctgtatgtgccgattgaccctacgtgtcagcccatgagattgtattcgacgtgtttgtatcatccaaatgctccacagtgtttgagtcatatgaacagcggatgcactttcaccagtccccacctagcccagcgggtggcctcgacggtgtaccagaattgtgagcatgctgacaactatacggcatactgcctcggaattagccacatggagccaagcttcgggctgattctgcatgacggtggaactacacttaaattcgtggacactcctgagtcgcttagcgggttgtacgtgtttgtagtgtatttcaatggtcatgttgaggcagtggcttataccgttgtcagcactgttgatcattttgtgaacgccattgaggagcgggggttcccgcctacggctgggcaaccccccgctacgactaagcctaaggaaattaccccggtgaatccaggtacctcgcctcttatcaggtatgcagcctggaccggtggtctggctgcagtcgtgctactatgcctcgtgattttcttgatctgcactgctaaacgcatgcgtgtcaaggcttatagggtggataaatccccctataaccagtctatgtactatgctggccttcctgtggacgacttcgaggattcggagtcgaccgatacagaggaggagtttggcaatgcgatcggggggagtcacgggggtagtagctacactgtgtatatcgataagacgagg

SEQ ID NO: 215 - RNA, 1869 nt, synthetic construct
  source 1..1869: mol_type = other RNA
atggggactgttaataagcctgtggtcggagtgttgatggggtttgggatcatcaccgggacattgaggatcacgaatcctgttcgtgcctcggtgttgcggtacgatgatttccacatagatgaggataagttggataccaattccgtttatgagccctattaccactctgaccacgccgaatcatcttgggtgaaccggggtgagtcttcgcgcaaggcttatgatcataattctccatacatatggccaagaaatgattatgatggtttcctggagaatgcccatgagcatcatggcgtttataaccaaggcagggggattgattctggagagcgtcttatgcagcctacccagatgtccgcccaggaggacctgggtgatgacactgggatccatgtgattccaactcttaatggtgacgatcgccataagattgtgaacgtggatcagaggcagtatggggacgtttttaagggcgatctcaatcctaagccgcagggacagaggctgatcgaggtttctgtggaggagaaccatccctttaccttgcgggctccaatccaaaggatctatggagtgaggtacacagaaacttggtcatttctgccctcgcttacctgcactggtgacgctgcccctgctattcagcatatatgccttaagcatacaacttgttttcaggatgtggtggtggatgttgattgcgctgagaataccaaggaagatcagcttgccgaaatttcttacagatttcagggcaaaaaggaagctgatcaaccttggattgttgtcaatacatccacgctttttgacgagctggagctcgatcccccggaaatcgagcctggcgtgttgaaggtgctgcgtactgagaagcaatatcttggggtgtatatctggaatatgcgggggtcggacggcaccagtacctatgccactttcctcgtgacgtggaagggcgacgagaagactcggaatcccacgccggctgtgaccccacagccgcgtggggccgagtttcacatgtggaattatcattctcacgtgttctctgtgggcgacacgttcagtttggccatgcaccttcagtacaagatacacgaagccccttttgatcttctgctcgaatggctgtatgtgccaattgacccgacgtgtcagcccatgagattatactctacgtgtttatatcatccaaatgctccacagtgtttgagtcatatgaacagtgggtgtacgttcacaagtcctcatctagcgcagcgcgtggcttccactgtctatcagaactgtgagcacgcagacaactatacagcctactgtctggggattagccacatggagccaagctttgggctgattcttcacgacggtggcaccacacttaagttcgtggacactcccgagtctttaagtgggttgtatgtttttgtggtttatttcaatggacacgtggaagccgtggcttacactgtggtgagtactgtggatcacttcgtgaatgccatcgaggagcgggggtttcctcctacggcaggacagccccccgcgaccacaaagcccaaagagattacaccagtgaaccctggcacaagccccctgattaggtatgctgcctggacaggcgggcttgctgccgtggtgttgctgtgtctagtcatctttttgatctgcactgccaagcggatgcgggtcaaggcttatcgggttgacaagtctccgtataatcagtcgatgtattacgcaggccttcctgtggatgattttgaggactctgagtccacagacaccgaggaggagtttggtaatgctattggcggtagtcacggggggtcgtcatatacagtgtatatcgacaagactcgg

SEQ ID NO: 216 - RNA, 1869 nt, synthetic construct
  source 1..1869: mol_type = other RNA
atggggactgttaataagccagttgtgggagttctgatggggttcggtatcatcactgggactctcaggattaccaatcctgttcgcgcctctgttttacgctatgatgactttcatattgatgaggataagctcgacacaaactctgtgtacgagccttattatcatagcgatcatgcagagtcgtcatgggtaaataggggtgagagttcccgcaaggcttatgatcataacagtccttatatctggccaagaaatgattacgatggtttcttggagaatgcccatgagcatcatggtgtttacaaccagggcagggggattgattctggagagcgtcttatgcagcctacccagatgtccgcccaggaggacctgggtgatgacactgggatccatgtgattccaactcttaatggtgacgatcgccataagattgtgaacgtggatcagaggcagtatggggacgtttttaagggcgatctcaatcctaagccgcagggacagaggctgatcgaggtttctgtggaggagaaccatccctttaccttgcgggctccaatccaaaggatctatggagtgaggtacacagaaacttggtcatttctgccctcgcttacctgcactggtgacgctgcccctgctattcagcatatatgccttaagcatacaacttgttttcaggatgtggtggtggatgttgattgcgctgagaataccaaggaagatcagcttgccgaaatttcttacagatttcagggcaaaaaggaagctgatcaaccttggattgttgtcaatacatccacgctttttgacgagctggagctcgatcccccggaaatcgagcctggcgtgttgaaggtgctgcgtactgagaagcaatatcttggggtgtatatctggaatatgcgggggtcggacggcaccagtacctatgccactttcctcgtgacgtggaagggcgacgagaagactcggaatcccacgccggctgtgaccccacagccgcgtggggccgagtttcacatgtggaattatcattctcacgtgttctctgtgggcgacacgttcagtttggccatgcaccttcagtacaagatacacgaagccccttttgatcttctgctcgaatggctgtatgtgccaattgacccgacgtgtcagcccatgagattatactctacgtgtttatatcatccaaatgctccacagtgtttgagtcatatgaacagtgggtgtacgttcacaagtccccacctagcccagcgggtggcctcgacggtgtaccagaattgtgagcatgctgacaactatacggcatactgcctcggaattagccacatggagccaagcttcgggctgattctgcatgacggtggaactacacttaaattcgtggacactcctgagtcgcttagcgggttgtacgtgtttgtagtgtatttcaatggtcatgttgaggcagtggcttataccgttgtcagcactgttgatcattttgtgaacgccattgaggagcgggggttcccgcctacggctgggcaaccccccgctacgactaagcccaaagagattacaccagtgaaccctggcacaagccccctgattaggtatgctgcctggacaggcgggcttgctgccgtggtgttgctgtgtctagtcatctttttgatctgcactgccaagcggatgcgggtcaaggcttatcgggttgacaagtctccgtataatcagtcgatgtattacgcaggccttcctgtggatgattttgaggactctgagtccacagacaccgaggaggagtttggtaatgctattggcggtagtcacggggggtcgtcatatacagtgtatatcgacaagactcgg

SEQ ID NO: 217 - RNA, 1869 nt, synthetic construct
  source 1..1869: mol_type = other RNA
atggggactgttaataagccagttgtgggagttctgatggggttcggtatcatcactgggactctcaggattaccaatcctgttcgcgcctctgttttacgctatgatgactttcatattgatgaggataagctcgacacaaactctgtgtacgagccttattatcatagcgatcatgcagagtcgtcatgggtaaataggggtgagagttcccgcaaggcttatgatcataacagtccttatatctggccaagaaatgattacgatggtttcttggagaatgcccatgagcatcatggtgtttacaaccagggtcggggtatcgactctggcgagagattgatgcaaccgacccaaatgagtgcgcaggaggacctaggcgatgataccgggattcacgtgattcctactctgaatggcgacgacagacacaagattgtcaatgttgatcagcggcagtacggggatgtgttcaagggtgacctcaatccgaagcctcaggggcagaggctcattgaggtttcggttgaggagaatcatccttttacactccgtgctcctattcagaggatttacggggtccggtatacagagacctggtcttttctgccgtcacttacttgcactggtgacgctgcccctgctattcagcatatatgccttaagcatacaacttgttttcaggatgtggtggtggatgttgattgcgctgagaataccaaggaagatcagcttgccgaaatttcttacagatttcagggcaaaaaggaagctgatcaaccttggattgttgtcaatacatccacgctttttgacgagctggagctcgatcccccggaaatcgagcctggcgtgttgaaggtgctgcgtactgagaagcaatatcttggggtgtatatctggaatatgcgggggtcggacggcaccagtacctatgccacctttctagtaacctggaagggtgacgagaagacccggaaccccacccctgctgtgactccgcagcctaggggtgcggagttccacatgtggaattaccattcccatgtgttttccgtgggtgatacgttcagtctggctatgcacctccagtataagatacacgaagctccttttgatcttctactggaatggctgtatgtgccgattgaccctacgtgtcagcccatgagattgtattcgacgtgtttgtatcatccaaatgctccacagtgtttgagtcatatgaacagcggatgcactttcaccagtcctcatctagcgcagcgcgtggcttccactgtctatcagaactgtgagcacgcagacaactatacagcctactgtctggggattagccacatggagccaagctttgggctgattcttcacgacggtggcaccacacttaagttcgtggacactcccgagtctttaagtgggttgtatgtttttgtggtttatttcaatggacacgtggaagccgtggcttacactgtggtgagtactgtggatcacttcgtgaatgccatcgaggagcgggggtttcctcctacggcaggacagccccccgcgaccacaaagcccaaagagattacaccagtgaaccctggcacaagccccctgattaggtatgctgcctggacaggcgggcttgctgccgtggtgttgctgtgtctagtcatctttttgatctgcactgccaagcggatgcgggtcaaggcttatcgggttgacaagtctccgtataatcagtcgatgtattacgcaggccttcctgtggatgattttgaggactctgagtccacagacaccgaggaggagtttggtaatgctattggcggtagtcacggggggtcgtcatatacagtgtatatcgacaagactcgg

SEQ ID NO: 218 - RNA, 1869 nt, synthetic construct
  source 1..1869: mol_type = other RNA
atggggactgttaataagcctgtggtcggagtgttgatggggtttgggatcatcaccgggacattgaggatcacgaatcctgttcgtgcctcggtgttgcggtacgatgatttccacatagatgaggataagttggataccaattccgtttatgagccctattaccactctgaccacgccgaatcatcttgggtgaaccggggtgagtcttcgcgcaaggcttatgatcataattctccatacatatggccaagaaatgattatgatggtttcctggagaatgcccatgagcatcatggcgtttataaccaaggtcggggtatcgactctggcgagagattgatgcaaccgacccaaatgagtgcgcaggaggacctaggcgatgataccgggattcacgtgattcctactctgaatggcgacgacagacacaagattgtcaatgttgatcagcggcagtacggggatgtgttcaagggtgacctcaatccgaagcctcaggggcagaggctcattgaggtttcggttgaggagaatcatccttttacactccgtgctcctattcagaggatttacggggtccggtatacagagacctggtcttttctgccgtcacttacttgcactggtgacgctgcccctgctattcagcatatatgccttaagcatacaacttgttttcaggatgtggtggtggatgttgattgcgctgagaataccaaggaagatcagcttgccgaaatttcttacagatttcagggcaaaaaggaagctgatcaaccttggattgttgtcaatacatccacgctttttgacgagctggagctcgatcccccggaaatcgagcctggcgtgttgaaggtgctgcgtactgagaagcaatatcttggggtgtatatctggaatatgcgggggtcggacggcaccagtacctatgccactttcctcgtgacgtggaagggcgacgagaagactcggaatcccacgccggctgtgaccccacagccgcgtggggccgagtttcacatgtggaattatcattctcacgtgttctctgtgggcgacacgttcagtttggccatgcaccttcagtacaagatacacgaagccccttttgatcttctgctcgaatggctgtatgtgccaattgacccgacgtgtcagcccatgagattatactctacgtgtttatatcatccaaatgctccacagtgtttgagtcatatgaacagtgggtgtacgttcacaagtccccacctagcccagcgggtggcctcgacggtgtaccagaattgtgagcatgctgacaactatacggcatactgcctcggaattagccacatggagccaagcttcgggctgattctgcatgacggtggaactacacttaaattcgtggacactcctgagtcgcttagcgggttgtacgtgtttgtagtgtatttcaatggtcatgttgaggcagtggcttataccgttgtcagcactgttgatcattttgtgaacgccattgaggagcgggggttcccgcctacggctgggcaaccccccgctacgactaagcccaaagagattacaccagtgaaccctggcacaagccccctgattaggtatgctgcctggacaggcgggcttgctgccgtggtgttgctgtgtctagtcatctttttgatctgcactgccaagcggatgcgggtcaaggcttatcgggttgacaagtctccgtataatcagtcgatgtattacgcaggccttcctgtggatgattttgaggactctgagtccacagacaccgaggaggagtttggtaatgctattggcggtagtcacggggggtcgtcatatacagtgtatatcgacaagactcgg

SEQ ID NO: 219 - RNA, 1869 nt, synthetic construct
  source 1..1869: mol_type = other RNA
atggggactgttaataagccagttgtgggagttctgatggggttcggtatcatcactgggactctcaggattaccaatcctgttcgcgcctctgttttacgctatgatgactttcatattgatgaggataagctcgacacaaactctgtgtacgagccttattatcatagcgatcatgcagagtcgtcatgggtaaataggggtgagagttcccgcaaggcttatgatcataacagtccttatatctggccaagaaatgattacgatggtttcttggagaatgcccatgagcatcatggtgtttacaaccagggtcggggtatcgactctggcgagagattgatgcaaccgacccaaatgagtgcgcaggaggacctaggcgatgataccgggattcacgtgattcctactctgaatggcgacgacagacacaagattgtcaatgttgatcagcggcagtacggggatgtgttcaagggtgacctcaatccgaagcctcaggggcagaggctcattgaggtttcggttgaggagaatcatccttttacactccgtgctcctattcagaggatttacggggtccggtatacagagacctggtcttttctgccgtcacttacttgcactggtgacgctgcccctgctattcagcatatatgccttaagcatacaacttgttttcaggatgtggtggtggatgttgattgcgctgagaataccaaggaagatcagcttgccgaaatttcttacagatttcagggcaaaaaggaagctgatcaaccttggattgttgtcaatacatccacgctttttgacgagctggagctcgatcccccggaaatcgagcctggcgtgttgaaggtgctgcgtactgagaagcaatatcttggggtgtatatctggaatatgcgggggtcggacggcaccagtacctatgccactttcctcgtgacgtggaagggcgacgagaagactcggaatcccacgccggctgtgaccccacagccgcgtggggccgagtttcacatgtggaattatcattctcacgtgttctctgtgggcgacacgttcagtttggccatgcaccttcagtacaagatacacgaagccccttttgatcttctgctcgaatggctgtatgtgccaattgacccgacgtgtcagcccatgagattatactctacgtgtttatatcatccaaatgctccacagtgtttgagtcatatgaacagtgggtgtacgttcacaagtcctcatctagcgcagcgcgtggcttccactgtctatcagaactgtgagcacgcagacaactatacagcctactgtctggggattagccacatggagccaagctttgggctgattcttcacgacggtggcaccacacttaagttcgtggacactcccgagtctttaagtgggttgtatgtttttgtggtttatttcaatggacacgtggaagccgtggcttacactgtggtgagtactgtggatcacttcgtgaatgccatcgaggagcgggggtttcctcctacggcaggacagccccccgcgaccacaaagcctaaggaaattaccccggtgaatccaggtacctcgcctcttatcaggtatgcagcctggaccggtggtctggctgcagtcgtgctactatgcctcgtgattttcttgatctgcactgctaaacgcatgcgtgtcaaggcttatagggtggataaatccccctataaccagtctatgtactatgctggccttcctgtggacgacttcgaggattcggagtcgaccgatacagaggaggagtttggcaatgcgatcggggggagtcacgggggtagtagctacactgtgtatatcgataagacgagg

SEQ ID NO: 220 - RNA, 1869 nt, synthetic construct
  source 1..1869: mol_type = other RNA
atggggactgttaataagccagttgtgggagttctgatggggttcggtatcatcactgggactctcaggattaccaatcctgttcgcgcctctgttttacgctatgatgactttcatattgatgaggataagctcgacacaaactctgtgtacgagccttattatcatagcgatcatgcagagtcgtcatgggtaaataggggtgagagttcccgcaaggcttatgatcataacagtccttatatctggccaagaaatgattacgatggtttcttggagaatgcccatgagcatcatggtgtttacaaccagggtcggggtatcgactctggcgagagattgatgcaaccgacccaaatgagtgcgcaggaggacctaggcgatgataccgggattcacgtgattcctactctgaatggcgacgacagacacaagattgtcaatgttgatcagcggcagtacggggatgtgttcaagggtgacctcaatccgaagcctcaggggcagaggctcattgaggtttcggttgaggagaatcatccttttacactccgtgctcctattcagaggatttacggggtccggtatacagagacctggtcttttctgccgtcacttacttgcactggtgacgctgcccctgctattcagcatatatgccttaagcatacaacttgttttcaggatgtggtggtggatgttgattgcgctgagaataccaaggaagatcagcttgccgaaatttcttacagatttcagggcaaaaaggaagctgatcaaccttggattgttgtcaatacatccacgctttttgacgagctggagctcgatcccccggaaatcgagcctggcgtgttgaaggtgctgcgtactgagaagcaatatcttggggtgtatatctggaatatgcgggggtcggacggcaccagtacctatgccactttcctcgtgacgtggaagggcgacgagaagactcggaatcccacgccggctgtgaccccacagccgcgtggggccgagtttcacatgtggaattatcattctcacgtgttctctgtgggcgacacgttcagtttggccatgcaccttcagtacaagatacacgaagccccttttgatcttctgctcgaatggctgtatgtgccaattgacccgacgtgtcagcccatgagattatactctacgtgtttatatcatccaaatgctccacagtgtttgagtcatatgaacagtgggtgtacgttcacaagtccccacctagcccagcgggtggcctcgacggtgtaccagaattgtgagcatgctgacaactatacggcatactgcctcggaattagccacatggagccaagcttcgggctgattctgcatgacggtggaactacacttaaattcgtggacactcctgagtcgcttagcgggttgtacgtgtttgtagtgtatttcaatggtcatgttgaggcagtggcttataccgttgtcagcactgttgatcattttgtgaacgccattgaggagcgggggttcccgcctacggctgggcaaccccccgctacgactaagcccaaagagattacaccagtgaaccctggcacaagccccctgattaggtatgctgcctggacaggcgggcttgctgccgtggtgttgctgtgtctagtcatctttttgatctgcactgccaagcggatgcgggtcaaggcttatcgggttgacaagtctccgtataatcagtcgatgtattacgcaggccttcctgtggatgattttgaggactctgagtccacagacaccgaggaggagtttggtaatgctattggcggtagtcacggggggtcgtcatatacagtgtatatcgacaagactcgg

SEQ ID NO: 221 - RNA, 1869 nt, synthetic construct
  source 1..1869: mol_type = other RNA
atggggactgttaataagcctgtggtcggagtgttgatggggtttgggatcatcaccgggacattgaggatcacgaatcctgttcgtgcctcggtgttgcggtacgatgatttccacatagatgaggataagttggataccaattccgtttatgagccctattaccactctgaccacgccgaatcatcttgggtgaaccggggtgagtcttcgcgcaaggcttatgatcataattctccatacatatggccaagaaatgattatgatggtttcctggagaatgcccatgagcatcatggcgtttataaccaaggcagggggattgattctggagagcgtcttatgcagcctacccagatgtccgcccaggaggacctgggtgatgacactgggatccatgtgattccaactcttaatggtgacgatcgccataagattgtgaacgtggatcagaggcagtatggggacgtttttaagggcgatctcaatcctaagccgcagggacagaggctgatcgaggtttctgtggaggagaaccatccctttaccttgcgggctccaatccaaaggatctatggagtgaggtacacagaaacttggtcatttctgccctcgcttacctgcactggtgacgctgcccctgctattcagcatatatgccttaagcatacaacttgttttcaggatgtggtggtggatgttgattgcgctgagaataccaaggaagatcagcttgccgaaatttcttacagatttcagggcaaaaaggaagctgatcaaccttggattgttgtcaatacatccacgctttttgacgagctggagctcgatcccccggaaatcgagcctggcgtgttgaaggtgctgcgtactgagaagcaatatcttggggtgtatatctggaatatgcgggggtcggacggcaccagtacctatgccactttcctcgtgacgtggaagggcgacgagaagactcggaatcccacgccggctgtgaccccacagccgcgtggggccgagtttcacatgtggaattatcattctcacgtgttctctgtgggcgacacgttcagtttggccatgcaccttcagtacaagatacacgaagccccttttgatcttctgctcgaatggctgtatgtgccaattgacccgacgtgtcagcccatgagattatactctacgtgtttatatcatccaaatgctccacagtgtttgagtcatatgaacagtgggtgtacgttcacaagtcctcatctagcgcagcgcgtggcttccactgtctatcagaactgtgagcacgcagacaactatacagcctactgtctggggattagccacatggagccaagctttgggctgattcttcacgacggtggcaccacacttaagttcgtggacactcccgagtctttaagtgggttgtatgtttttgtggtttatttcaatggacacgtggaagccgtggcttacactgtggtgagtactgtggatcacttcgtgaatgccatcgaggagcgggggtttcctcctacggcaggacagccccccgcgaccacaaagcctaaggaaattaccccggtgaatccaggtacctcgcctcttatcaggtatgcagcctggaccggtggtctggctgcagtcgtgctactatgcctcgtgattttcttgatctgcactgctaaacgcatgcgtgtcaaggcttatagggtggataaatccccctataaccagtctatgtactatgctggccttcctgtggacgacttcgaggattcggagtcgaccgatacagaggaggagtttggcaatgcgatcggggggagtcacgggggtagtagctacactgtgtatatcgataagacgagg

SEQ ID NO: 222 - RNA, 1869 nt, synthetic construct
  source 1..1869: mol_type = other RNA
atggggactgttaataagccagttgtgggagttctgatggggttcggtatcatcactgggactctcaggattaccaatcctgttcgcgcctctgttttacgctatgatgactttcatattgatgaggataagctcgacacaaactctgtgtacgagccttattatcatagcgatcatgcagagtcgtcatgggtaaataggggtgagagttcccgcaaggcttatgatcataacagtccttatatctggccaagaaatgattacgatggtttcttggagaatgcccatgagcatcatggtgtttacaaccagggcagggggattgattctggagagcgtcttatgcagcctacccagatgtccgcccaggaggacctgggtgatgacactgggatccatgtgattccaactcttaatggtgacgatcgccataagattgtgaacgtggatcagaggcagtatggggacgtttttaagggcgatctcaatcctaagccgcagggacagaggctgatcgaggtttctgtggaggagaaccatccctttaccttgcgggctccaatccaaaggatctatggagtgaggtacacagaaacttggtcatttctgccctcgcttacctgcactggtgacgctgcccctgctattcagcatatatgccttaagcatacaacttgttttcaggatgtggtggtggatgttgattgcgctgagaataccaaggaagatcagcttgccgaaatttcttacagatttcagggcaaaaaggaagctgatcaaccttggattgttgtcaatacatccacgctttttgacgagctggagctcgatcccccggaaatcgagcctggcgtgttgaaggtgctgcgtactgagaagcaatatcttggggtgtatatctggaatatgcgggggtcggacggcaccagtacctatgccactttcctcgtgacgtggaagggcgacgagaagactcggaatcccacgccggctgtgaccccacagccgcgtggggccgagtttcacatgtggaattatcattctcacgtgttctctgtgggcgacacgttcagtttggccatgcaccttcagtacaagatacacgaagccccttttgatcttctgctcgaatggctgtatgtgccaattgacccgacgtgtcagcccatgagattatactctacgtgtttatatcatccaaatgctccacagtgtttgagtcatatgaacagtgggtgtacgttcacaagtccccacctagcccagcgggtggcctcgacggtgtaccagaattgtgagcatgctgacaactatacggcatactgcctcggaattagccacatggagccaagcttcgggctgattctgcatgacggtggaactacacttaaattcgtggacactcctgagtcgcttagcgggttgtacgtgtttgtagtgtatttcaatggtcatgttgaggcagtggcttataccgttgtcagcactgttgatcattttgtgaacgccattgaggagcgggggttcccgcctacggctgggcaaccccccgctacgactaagcctaaggaaattaccccggtgaatccaggtacctcgcctcttatcaggtatgcagcctggaccggtggtctggctgcagtcgtgctactatgcctcgtgattttcttgatctgcactgctaaacgcatgcgtgtcaaggcttatagggtggataaatccccctataaccagtctatgtactatgctggccttcctgtggacgacttcgaggattcggagtcgaccgatacagaggaggagtttggcaatgcgatcggggggagtcacgggggtagtagctacactgtgtatatcgataagacgagg

SEQ ID NO: 223 - RNA, 1869 nt, synthetic construct
  source 1..1869: mol_type = other RNA
atggggactgttaataagcctgtggtcggagtgttgatggggtttgggatcatcaccgggacattgaggatcacgaatcctgttcgtgcctcggtgttgcggtacgatgatttccacatagatgaggataagttggataccaattccgtttatgagccctattaccactctgaccacgccgaatcatcttgggtgaaccggggtgagtcttcgcgcaaggcttatgatcataattctccatacatatggccaagaaatgattatgatggtttcctggagaatgcccatgagcatcatggcgtttataaccaaggtcggggtatcgactctggcgagagattgatgcaaccgacccaaatgagtgcgcaggaggacctaggcgatgataccgggattcacgtgattcctactctgaatggcgacgacagacacaagattgtcaatgttgatcagcggcagtacggggatgtgttcaagggtgacctcaatccgaagcctcaggggcagaggctcattgaggtttcggttgaggagaatcatccttttacactccgtgctcctattcagaggatttacggggtccggtatacagagacctggtcttttctgccgtcacttacttgcactggagatgctgctcccgctattcaacatatctgtctcaagcacaccacgtgcttccaggatgtggttgtagacgtcgattgcgctgagaataccaaggaggatcagctggctgagatcagttaccgcttccaggggaagaaggaagctgatcagccttggattgttgtgaatacgtctacactgtttgacgagcttgaactggaccctccagaaatcgagccaggtgtgttgaaagtgttgaggactgagaaacagtaccttggagtgtatatctggaatatgagaggttccgacgggacctctacatatgccactttcctcgtgacgtggaagggcgacgagaagactcggaatcccacgccggctgtgaccccacagccgcgtggggccgagtttcacatgtggaattatcattctcacgtgttctctgtgggcgacacgttcagtttggccatgcaccttcagtacaagatacacgaagccccttttgatcttctgctcgaatggctgtatgtgccaattgacccgacgtgtcagcccatgagattatactctacgtgtttatatcatccaaatgctccacagtgtttgagtcatatgaacagtgggtgtacgttcacaagtcctcatctagcgcagcgcgtggcttccactgtctatcagaactgtgagcacgcagacaactatacagcctactgtctggggattagccacatggagccaagctttgggctgattcttcacgacggtggcaccacacttaagttcgtggacactcccgagtctttaagtgggttgtatgtttttgtggtttatttcaatggacacgtggaagccgtggcttacactgtggtgagtactgtggatcacttcgtgaatgccatcgaggagcgggggtttcctcctacggcaggacagccccccgcgaccacaaagcctaaggaaattaccccggtgaatccaggtacctcgcctcttatcaggtatgcagcctggaccggtggtctggctgcagtcgtgctactatgcctcgtgattttcttgatctgcactgctaaacgcatgcgtgtcaaggcttatagggtggataaatccccctataaccagtctatgtactatgctggccttcctgtggacgacttcgaggattcggagtcgaccgatacagaggaggagtttggcaatgcgatcggggggagtcacgggggtagtagctacactgtgtatatcgataagacgagg

SEQ ID NO: 224 - RNA, 1869 nt, synthetic construct
  source 1..1869: mol_type = other RNA
atggggactgttaataagcctgtggtcggagtgttgatggggtttgggatcatcaccgggacattgaggatcacgaatcctgttcgtgcctcggtgttgcggtacgatgatttccacatagatgaggataagttggataccaattccgtttatgagccctattaccactctgaccacgccgaatcatcttgggtgaaccggggtgagtcttcgcgcaaggcttatgatcataattctccatacatatggccaagaaatgattatgatggtttcctggagaatgcccatgagcatcatggcgtttataaccaaggtcggggtatcgactctggcgagagattgatgcaaccgacccaaatgagtgcgcaggaggacctaggcgatgataccgggattcacgtgattcctactctgaatggcgacgacagacacaagattgtcaatgttgatcagcggcagtacggggatgtgttcaagggtgacctcaatccgaagcctcaggggcagaggctcattgaggtttcggttgaggagaatcatccttttacactccgtgctcctattcagaggatttacggggtccggtatacagagacctggtcttttctgccgtcacttacttgcactggagatgctgctcccgctattcaacatatctgtctcaagcacaccacgtgcttccaggatgtggttgtagacgtcgattgcgctgagaataccaaggaggatcagctggctgagatcagttaccgcttccaggggaagaaggaagctgatcagccttggattgttgtgaatacgtctacactgtttgacgagcttgaactggaccctccagaaatcgagccaggtgtgttgaaagtgttgaggactgagaaacagtaccttggagtgtatatctggaatatgagaggttccgacgggacctctacatatgccactttcctcgtgacgtggaagggcgacgagaagactcggaatcccacgccggctgtgaccccacagccgcgtggggccgagtttcacatgtggaattatcattctcacgtgttctctgtgggcgacacgttcagtttggccatgcaccttcagtacaagatacacgaagccccttttgatcttctgctcgaatggctgtatgtgccaattgacccgacgtgtcagcccatgagattatactctacgtgtttatatcatccaaatgctccacagtgtttgagtcatatgaacagtgggtgtacgttcacaagtcctcatctagcgcagcgcgtggcttccactgtctatcagaactgtgagcacgcagacaactatacagcctactgtctggggattagccacatggagccaagctttgggctgattcttcacgacggtggcaccacacttaagttcgtggacactcccgagtctttaagtgggttgtatgtttttgtggtttatttcaatggacacgtggaagccgtggcttacactgtggtgagtactgtggatcacttcgtgaatgccatcgaggagcgggggtttcctcctacggcaggacagccccccgcgaccacaaagcccaaagagattacaccagtgaaccctggcacaagccccctgattaggtatgctgcctggacaggcgggcttgctgccgtggtgttgctgtgtctagtcatctttttgatctgcactgccaagcggatgcgggtcaaggcttatcgggttgacaagtctccgtataatcagtcgatgtattacgcaggccttcctgtggatgattttgaggactctgagtccacagacaccgaggaggagtttggtaatgctattggcggtagtcacggggggtcgtcatatacagtgtatatcgacaagactcgg

SEQ ID NO: 225 - RNA, 1869 nt, synthetic construct
  source 1..1869: mol_type = other RNA
atggggactgttaataagccagttgtgggagttctgatggggttcggtatcatcactgggactctcaggattaccaatcctgttcgcgcctctgttttacgctatgatgactttcatattgatgaggataagctcgacacaaactctgtgtacgagccttattatcatagcgatcatgcagagtcgtcatgggtaaataggggtgagagttcccgcaaggcttatgatcataacagtccttatatctggccaagaaatgattacgatggtttcttggagaatgcccatgagcatcatggtgtttacaaccagggcagggggattgattctggagagcgtcttatgcagcctacccagatgtccgcccaggaggacctgggtgatgacactgggatccatgtgattccaactcttaatggtgacgatcgccataagattgtgaacgtggatcagaggcagtatggggacgtttttaagggcgatctcaatcctaagccgcagggacagaggctgatcgaggtttctgtggaggagaaccatccctttaccttgcgggctccaatccaaaggatctatggagtgaggtacacagaaacttggtcatttctgccctcgcttacctgcactggagatgctgctcccgctattcaacatatctgtctcaagcacaccacgtgcttccaggatgtggttgtagacgtcgattgcgctgagaataccaaggaggatcagctggctgagatcagttaccgcttccaggggaagaaggaagctgatcagccttggattgttgtgaatacgtctacactgtttgacgagcttgaactggaccctccagaaatcgagccaggtgtgttgaaagtgttgaggactgagaaacagtaccttggagtgtatatctggaatatgagaggttccgacgggacctctacatatgccacctttctagtaacctggaagggtgacgagaagacccggaaccccacccctgctgtgactccgcagcctaggggtgcggagttccacatgtggaattaccattcccatgtgttttccgtgggtgatacgttcagtctggctatgcacctccagtataagatacacgaagctccttttgatcttctactggaatggctgtatgtgccgattgaccctacgtgtcagcccatgagattgtattcgacgtgtttgtatcatccaaatgctccacagtgtttgagtcatatgaacagcggatgcactttcaccagtcctcatctagcgcagcgcgtggcttccactgtctatcagaactgtgagcacgcagacaactatacagcctactgtctggggattagccacatggagccaagctttgggctgattcttcacgacggtggcaccacacttaagttcgtggacactcccgagtctttaagtgggttgtatgtttttgtggtttatttcaatggacacgtggaagccgtggcttacactgtggtgagtactgtggatcacttcgtgaatgccatcgaggagcgggggtttcctcctacggcaggacagccccccgcgaccacaaagcctaaggaaattaccccggtgaatccaggtacctcgcctcttatcaggtatgcagcctggaccggtggtctggctgcagtcgtgctactatgcctcgtgattttcttgatctgcactgctaaacgcatgcgtgtcaaggcttatagggtggataaatccccctataaccagtctatgtactatgctggccttcctgtggacgacttcgaggattcggagtcgaccgatacagaggaggagtttggcaatgcgatcggggggagtcacgggggtagtagctacactgtgtatatcgataagacgagg

SEQ ID NO: 226 - RNA, 1869 nt, synthetic construct
  source 1..1869: mol_type = other RNA
atggggactgttaataagcctgtggtcggagtgttgatggggtttgggatcatcaccgggacattgaggatcacgaatcctgttcgtgcctcggtgttgcggtacgatgatttccacatagatgaggataagttggataccaattccgtttatgagccctattaccactctgaccacgccgaatcatcttgggtgaaccggggtgagtcttcgcgcaaggcttatgatcataattctccatacatatggccaagaaatgattatgatggtttcctggagaatgcccatgagcatcatggcgtttataaccaaggtcggggtatcgactctggcgagagattgatgcaaccgacccaaatgagtgcgcaggaggacctaggcgatgataccgggattcacgtgattcctactctgaatggcgacgacagacacaagattgtcaatgttgatcagcggcagtacggggatgtgttcaagggtgacctcaatccgaagcctcaggggcagaggctcattgaggtttcggttgaggagaatcatccttttacactccgtgctcctattcagaggatttacggggtccggtatacagagacctggtcttttctgccgtcacttacttgcactggagatgctgctcccgctattcaacatatctgtctcaagcacaccacgtgcttccaggatgtggttgtagacgtcgattgcgctgagaataccaaggaggatcagctggctgagatcagttaccgcttccaggggaagaaggaagctgatcagccttggattgttgtgaatacgtctacactgtttgacgagcttgaactggaccctccagaaatcgagccaggtgtgttgaaagtgttgaggactgagaaacagtaccttggagtgtatatctggaatatgagaggttccgacgggacctctacatatgccacctttctagtaacctggaagggtgacgagaagacccggaaccccacccctgctgtgactccgcagcctaggggtgcggagttccacatgtggaattaccattcccatgtgttttccgtgggtgatacgttcagtctggctatgcacctccagtataagatacacgaagctccttttgatcttctactggaatggctgtatgtgccgattgaccctacgtgtcagcccatgagattgtattcgacgtgtttgtatcatccaaatgctccacagtgtttgagtcatatgaacagcggatgcactttcaccagtccccacctagcccagcgggtggcctcgacggtgtaccagaattgtgagcatgctgacaactatacggcatactgcctcggaattagccacatggagccaagcttcgggctgattctgcatgacggtggaactacacttaaattcgtggacactcctgagtcgcttagcgggttgtacgtgtttgtagtgtatttcaatggtcatgttgaggcagtggcttataccgttgtcagcactgttgatcattttgtgaacgccattgaggagcgggggttcccgcctacggctgggcaaccccccgctacgactaagcctaaggaaattaccccggtgaatccaggtacctcgcctcttatcaggtatgcagcctggaccggtggtctggctgcagtcgtgctactatgcctcgtgattttcttgatctgcactgctaaacgcatgcgtgtcaaggcttatagggtggataaatccccctataaccagtctatgtactatgctggccttcctgtggacgacttcgaggattcggagtcgaccgatacagaggaggagtttggcaatgcgatcggggggagtcacgggggtagtagctacactgtgtatatcgataagacgagg

SEQ ID NO: 227 - RNA, 1869 nt, synthetic construct
  source 1..1869: mol_type = other RNA
atggggactgttaataagccagttgtgggagttctgatggggttcggtatcatcactgggactctcaggattaccaatcctgttcgcgcctctgttttacgctatgatgactttcatattgatgaggataagctcgacacaaactctgtgtacgagccttattatcatagcgatcatgcagagtcgtcatgggtaaataggggtgagagttcccgcaaggcttatgatcataacagtccttatatctggccaagaaatgattacgatggtttcttggagaatgcccatgagcatcatggtgtttacaaccagggcagggggattgattctggagagcgtcttatgcagcctacccagatgtccgcccaggaggacctgggtgatgacactgggatccatgtgattccaactcttaatggtgacgatcgccataagattgtgaacgtggatcagaggcagtatggggacgtttttaagggcgatctcaatcctaagccgcagggacagaggctgatcgaggtttctgtggaggagaaccatccctttaccttgcgggctccaatccaaaggatctatggagtgaggtacacagaaacttggtcatttctgccctcgcttacctgcactggagatgctgctcccgctattcaacatatctgtctcaagcacaccacgtgcttccaggatgtggttgtagacgtcgattgcgctgagaataccaaggaggatcagctggctgagatcagttaccgcttccaggggaagaaggaagctgatcagccttggattgttgtgaatacgtctacactgtttgacgagcttgaactggaccctccagaaatcgagccaggtgtgttgaaagtgttgaggactgagaaacagtaccttggagtgtatatctggaatatgagaggttccgacgggacctctacatatgccacctttctagtaacctggaagggtgacgagaagacccggaaccccacccctgctgtgactccgcagcctaggggtgcggagttccacatgtggaattaccattcccatgtgttttccgtgggtgatacgttcagtctggctatgcacctccagtataagatacacgaagctccttttgatcttctactggaatggctgtatgtgccgattgaccctacgtgtcagcccatgagattgtattcgacgtgtttgtatcatccaaatgctccacagtgtttgagtcatatgaacagcggatgcactttcaccagtccccacctagcccagcgggtggcctcgacggtgtaccagaattgtgagcatgctgacaactatacggcatactgcctcggaattagccacatggagccaagcttcgggctgattctgcatgacggtggaactacacttaaattcgtggacactcctgagtcgcttagcgggttgtacgtgtttgtagtgtatttcaatggtcatgttgaggcagtggcttataccgttgtcagcactgttgatcattttgtgaacgccattgaggagcgggggttcccgcctacggctgggcaaccccccgctacgactaagcccaaagagattacaccagtgaaccctggcacaagccccctgattaggtatgctgcctggacaggcgggcttgctgccgtggtgttgctgtgtctagtcatctttttgatctgcactgccaagcggatgcgggtcaaggcttatcgggttgacaagtctccgtataatcagtcgatgtattacgcaggccttcctgtggatgattttgaggactctgagtccacagacaccgaggaggagtttggtaatgctattggcggtagtcacggggggtcgtcatatacagtgtatatcgacaagactcgg

SEQ ID NO: 228 - RNA, 1869 nt, synthetic construct
  source 1..1869: mol_type = other RNA
atggggactgttaataagcctgtggtcggagtgttgatggggtttgggatcatcaccgggacattgaggatcacgaatcctgttcgtgcctcggtgttgcggtacgatgatttccacatagatgaggataagttggataccaattccgtttatgagccctattaccactctgaccacgccgaatcatcttgggtgaaccggggtgagtcttcgcgcaaggcttatgatcataattctccatacatatggccaagaaatgattatgatggtttcctggagaatgcccatgagcatcatggcgtttataaccaaggtcggggtatcgactctggcgagagattgatgcaaccgacccaaatgagtgcgcaggaggacctaggcgatgataccgggattcacgtgattcctactctgaatggcgacgacagacacaagattgtcaatgttgatcagcggcagtacggggatgtgttcaagggtgacctcaatccgaagcctcaggggcagaggctcattgaggtttcggttgaggagaatcatccttttacactccgtgctcctattcagaggatttacggggtccggtatacagagacctggtcttttctgccgtcacttacttgcactggagatgctgctcccgctattcaacatatctgtctcaagcacaccacgtgcttccaggatgtggttgtagacgtcgattgcgctgagaataccaaggaggatcagctggctgagatcagttaccgcttccaggggaagaaggaagctgatcagccttggattgttgtgaatacgtctacactgtttgacgagcttgaactggaccctccagaaatcgagccaggtgtgttgaaagtgttgaggactgagaaacagtaccttggagtgtatatctggaatatgagaggttccgacgggacctctacatatgccacctttctagtaacctggaagggtgacgagaagacccggaaccccacccctgctgtgactccgcagcctaggggtgcggagttccacatgtggaattaccattcccatgtgttttccgtgggtgatacgttcagtctggctatgcacctccagtataagatacacgaagctccttttgatcttctactggaatggctgtatgtgccgattgaccctacgtgtcagcccatgagattgtattcgacgtgtttgtatcatccaaatgctccacagtgtttgagtcatatgaacagcggatgcactttcaccagtcctcatctagcgcagcgcgtggcttccactgtctatcagaactgtgagcacgcagacaactatacagcctactgtctggggattagccacatggagccaagctttgggctgattcttcacgacggtggcaccacacttaagttcgtggacactcccgagtctttaagtgggttgtatgtttttgtggtttatttcaatggacacgtggaagccgtggcttacactgtggtgagtactgtggatcacttcgtgaatgccatcgaggagcgggggtttcctcctacggcaggacagccccccgcgaccacaaagcctaaggaaattaccccggtgaatccaggtacctcgcctcttatcaggtatgcagcctggaccggtggtctggctgcagtcgtgctactatgcctcgtgattttcttgatctgcactgctaaacgcatgcgtgtcaaggcttatagggtggataaatccccctataaccagtctatgtactatgctggccttcctgtggacgacttcgaggattcggagtcgaccgatacagaggaggagtttggcaatgcgatcggggggagtcacgggggtagtagctacactgtgtatatcgataagacgagg

SEQ ID NO: 229 - RNA, 1869 nt, synthetic construct
  source 1..1869: mol_type = other RNA
atggggactgttaataagccagttgtgggagttctgatggggttcggtatcatcactgggactctcaggattaccaatcctgttcgcgcctctgttttacgctatgatgactttcatattgatgaggataagctcgacacaaactctgtgtacgagccttattatcatagcgatcatgcagagtcgtcatgggtaaataggggtgagagttcccgcaaggcttatgatcataacagtccttatatctggccaagaaatgattacgatggtttcttggagaatgcccatgagcatcatggtgtttacaaccagggtcggggtatcgactctggcgagagattgatgcaaccgacccaaatgagtgcgcaggaggacctaggcgatgataccgggattcacgtgattcctactctgaatggcgacgacagacacaagattgtcaatgttgatcagcggcagtacggggatgtgttcaagggtgacctcaatccgaagcctcaggggcagaggctcattgaggtttcggttgaggagaatcatccttttacactccgtgctcctattcagaggatttacggggtccggtatacagagacctggtcttttctgccgtcacttacttgcactggagatgctgctcccgctattcaacatatctgtctcaagcacaccacgtgcttccaggatgtggttgtagacgtcgattgcgctgagaataccaaggaggatcagctggctgagatcagttaccgcttccaggggaagaaggaagctgatcagccttggattgttgtgaatacgtctacactgtttgacgagcttgaactggaccctccagaaatcgagccaggtgtgttgaaagtgttgaggactgagaaacagtaccttggagtgtatatctggaatatgagaggttccgacgggacctctacatatgccacctttctagtaacctggaagggtgacgagaagacccggaaccccacccctgctgtgactccgcagcctaggggtgcggagttccacatgtggaattaccattcccatgtgttttccgtgggtgatacgttcagtctggctatgcacctccagtataagatacacgaagctccttttgatcttctactggaatggctgtatgtgccgattgaccctacgtgtcagcccatgagattgtattcgacgtgtttgtatcatccaaatgctccacagtgtttgagtcatatgaacagcggatgcactttcaccagtcctcatctagcgcagcgcgtggcttccactgtctatcagaactgtgagcacgcagacaactatacagcctactgtctggggattagccacatggagccaagctttgggctgattcttcacgacggtggcaccacacttaagttcgtggacactcccgagtctttaagtgggttgtatgtttttgtggtttatttcaatggacacgtggaagccgtggcttacactgtggtgagtactgtggatcacttcgtgaatgccatcgaggagcgggggtttcctcctacggcaggacagccccccgcgaccacaaagcctaaggaaattaccccggtgaatccaggtacctcgcctcttatcaggtatgcagcctggaccggtggtctggctgcagtcgtgctactatgcctcgtgattttcttgatctgcactgctaaacgcatgcgtgtcaaggcttatagggtggataaatccccctataaccagtctatgtactatgctggccttcctgtggacgacttcgaggattcggagtcgaccgatacagaggaggagtttggcaatgcgatcggggggagtcacgggggtagtagctacactgtgtatatcgataagacgagg

SEQ ID NO: 230 - RNA, 1869 nt, synthetic construct
  source 1..1869: mol_type = other RNA
atggggactgttaataagccagttgtgggagttctgatggggttcggtatcatcactgggactctcaggattaccaatcctgttcgcgcctctgttttacgctatgatgactttcatattgatgaggataagctcgacacaaactctgtgtacgagccttattatcatagcgatcatgcagagtcgtcatgggtaaataggggtgagagttcccgcaaggcttatgatcataacagtccttatatctggccaagaaatgattacgatggtttcttggagaatgcccatgagcatcatggtgtttacaaccagggtcggggtatcgactctggcgagagattgatgcaaccgacccaaatgagtgcgcaggaggacctaggcgatgataccgggattcacgtgattcctactctgaatggcgacgacagacacaagattgtcaatgttgatcagcggcagtacggggatgtgttcaagggtgacctcaatccgaagcctcaggggcagaggctcattgaggtttcggttgaggagaatcatccttttacactccgtgctcctattcagaggatttacggggtccggtatacagagacctggtcttttctgccgtcacttacttgcactggagatgctgctcccgctattcaacatatctgtctcaagcacaccacgtgcttccaggatgtggttgtagacgtcgattgcgctgagaataccaaggaggatcagctggctgagatcagttaccgcttccaggggaagaaggaagctgatcagccttggattgttgtgaatacgtctacactgtttgacgagcttgaactggaccctccagaaatcgagccaggtgtgttgaaagtgttgaggactgagaaacagtaccttggagtgtatatctggaatatgagaggttccgacgggacctctacatatgccactttcctcgtgacgtggaagggcgacgagaagactcggaatcccacgccggctgtgaccccacagccgcgtggggccgagtttcacatgtggaattatcattctcacgtgttctctgtgggcgacacgttcagtttggccatgcaccttcagtacaagatacacgaagccccttttgatcttctgctcgaatggctgtatgtgccaattgacccgacgtgtcagcccatgagattatactctacgtgtttatatcatccaaatgctccacagtgtttgagtcatatgaacagtgggtgtacgttcacaagtccccacctagcccagcgggtggcctcgacggtgtaccagaattgtgagcatgctgacaactatacggcatactgcctcggaattagccacatggagccaagcttcgggctgattctgcatgacggtggaactacacttaaattcgtggacactcctgagtcgcttagcgggttgtacgtgtttgtagtgtatttcaatggtcatgttgaggcagtggcttataccgttgtcagcactgttgatcattttgtgaacgccattgaggagcgggggttcccgcctacggctgggcaaccccccgctacgactaagcccaaagagattacaccagtgaaccctggcacaagccccctgattaggtatgctgcctggacaggcgggcttgctgccgtggtgttgctgtgtctagtcatctttttgatctgcactgccaagcggatgcgggtcaaggcttatcgggttgacaagtctccgtataatcagtcgatgtattacgcaggccttcctgtggatgattttgaggactctgagtccacagacaccgaggaggagtttggtaatgctattggcggtagtcacggggggtcgtcatatacagtgtatatcgacaagactcgg

SEQ ID NO: 231 - RNA, 1869 nt, synthetic construct
  source 1..1869: mol_type = other RNA
atggggactgttaataagccagttgtgggagttctgatggggttcggtatcatcactgggactctcaggattaccaatcctgttcgcgcctctgttttacgctatgatgactttcatattgatgaggataagctcgacacaaactctgtgtacgagccttattatcatagcgatcatgcagagtcgtcatgggtaaataggggtgagagttcccgcaaggcttatgatcataacagtccttatatctggccaagaaatgattacgatggtttcttggagaatgcccatgagcatcatggtgtttacaaccagggcagggggattgattctggagagcgtcttatgcagcctacccagatgtccgcccaggaggacctgggtgatgacactgggatccatgtgattccaactcttaatggtgacgatcgccataagattgtgaacgtggatcagaggcagtatggggacgtttttaagggcgatctcaatcctaagccgcagggacagaggctgatcgaggtttctgtggaggagaaccatccctttaccttgcgggctccaatccaaaggatctatggagtgaggtacacagaaacttggtcatttctgccctcgcttacctgcactggtgacgctgcccctgctattcagcatatatgccttaagcatacaacttgttttcaggatgtggtggtggatgttgattgcgctgagaataccaaggaagatcagcttgccgaaatttcttacagatttcagggcaaaaaggaagctgatcaaccttggattgttgtcaatacatccacgctttttgacgagctggagctcgatcccccggaaatcgagcctggcgtgttgaaggtgctgcgtactgagaagcaatatcttggggtgtatatctggaatatgcgggggtcggacggcaccagtacctatgccactttcctcgtgacgtggaagggcgacgagaagactcggaatcccacgccggctgtgaccccacagccgcgtggggccgagtttcacatgtggaattatcattctcacgtgttctctgtgggcgacacgttcagtttggccatgcaccttcagtacaagatacacgaagccccttttgatcttctgctcgaatggctgtatgtgccaattgacccgacgtgtcagcccatgagattatactctacgtgtttatatcatccaaatgctccacagtgtttgagtcatatgaacagtgggtgtacgttcacaagtcctcatctagcgcagcgcgtggcttccactgtctatcagaactgtgagcacgcagacaactatacagcctactgtctggggattagccacatggagccaagctttgggctgattcttcacgacggtggcaccacacttaagttcgtggacactcccgagtctttaagtgggttgtatgtttttgtggtttatttcaatggacacgtggaagccgtggcttacactgtggtgagtactgtggatcacttcgtgaatgccatcgaggagcgggggtttcctcctacggcaggacagccccccgcgaccacaaagcccaaagagattacaccagtgaaccctggcacaagccccctgattaggtatgctgcctggacaggcgggcttgctgccgtggtgttgctgtgtctagtcatctttttgatctgcactgccaagcggatgcgggtcaaggcttatcgggttgacaagtctccgtataatcagtcgatgtattacgcaggccttcctgtggatgattttgaggactctgagtccacagacaccgaggaggagtttggtaatgctattggcggtagtcacggggggtcgtcatatacagtgtatatcgacaagactcgg

SEQ ID NO: 232 - RNA, 1869 nt, synthetic construct
  source 1..1869: mol_type = other RNA
atggggactgttaataagccagttgtgggagttctgatggggttcggtatcatcactgggactctcaggattaccaatcctgttcgcgcctctgttttacgctatgatgactttcatattgatgaggataagctcgacacaaactctgtgtacgagccttattatcatagcgatcatgcagagtcgtcatgggtaaataggggtgagagttcccgcaaggcttatgatcataacagtccttatatctggccaagaaatgattacgatggtttcttggagaatgcccatgagcatcatggtgtttacaaccagggtcggggtatcgactctggcgagagattgatgcaaccgacccaaatgagtgcgcaggaggacctaggcgatgataccgggattcacgtgattcctactctgaatggcgacgacagacacaagattgtcaatgttgatcagcggcagtacggggatgtgttcaagggtgacctcaatccgaagcctcaggggcagaggctcattgaggtttcggttgaggagaatcatccttttacactccgtgctcctattcagaggatttacggggtccggtatacagagacctggtcttttctgccgtcacttacttgcactggtgacgctgcccctgctattcagcatatatgccttaagcatacaacttgttttcaggatgtggtggtggatgttgattgcgctgagaataccaaggaagatcagcttgccgaaatttcttacagatttcagggcaaaaaggaagctgatcaaccttggattgttgtcaatacatccacgctttttgacgagctggagctcgatcccccggaaatcgagcctggcgtgttgaaggtgctgcgtactgagaagcaatatcttggggtgtatatctggaatatgcgggggtcggacggcaccagtacctatgccactttcctcgtgacgtggaagggcgacgagaagactcggaatcccacgccggctgtgaccccacagccgcgtggggccgagtttcacatgtggaattatcattctcacgtgttctctgtgggcgacacgttcagtttggccatgcaccttcagtacaagatacacgaagccccttttgatcttctgctcgaatggctgtatgtgccaattgacccgacgtgtcagcccatgagattatactctacgtgtttatatcatccaaatgctccacagtgtttgagtcatatgaacagtgggtgtacgttcacaagtcctcatctagcgcagcgcgtggcttccactgtctatcagaactgtgagcacgcagacaactatacagcctactgtctggggattagccacatggagccaagctttgggctgattcttcacgacggtggcaccacacttaagttcgtggacactcccgagtctttaagtgggttgtatgtttttgtggtttatttcaatggacacgtggaagccgtggcttacactgtggtgagtactgtggatcacttcgtgaatgccatcgaggagcgggggtttcctcctacggcaggacagccccccgcgaccacaaagcccaaagagattacaccagtgaaccctggcacaagccccctgattaggtatgctgcctggacaggcgggcttgctgccgtggtgttgctgtgtctagtcatctttttgatctgcactgccaagcggatgcgggtcaaggcttatcgggttgacaagtctccgtataatcagtcgatgtattacgcaggccttcctgtggatgattttgaggactctgagtccacagacaccgaggaggagtttggtaatgctattggcggtagtcacggggggtcgtcatatacagtgtatatcgacaagactcgg

SEQ ID NO: 233 - RNA, 1869 nt, synthetic construct
  source 1..1869: mol_type = other RNA
atggggactgttaataagcctgtggtcggagtgttgatggggtttgggatcatcaccgggacattgaggatcacgaatcctgttcgtgcctcggtgttgcggtacgatgatttccacatagatgaggataagttggataccaattccgtttatgagccctattaccactctgaccacgccgaatcatcttgggtgaaccggggtgagtcttcgcgcaaggcttatgatcataattctccatacatatggccaagaaatgattatgatggtttcctggagaatgcccatgagcatcatggcgtttataaccaaggcagggggattgattctggagagcgtcttatgcagcctacccagatgtccgcccaggaggacctgggtgatgacactgggatccatgtgattccaactcttaatggtgacgatcgccataagattgtgaacgtggatcagaggcagtatggggacgtttttaagggcgatctcaatcctaagccgcagggacagaggctgatcgaggtttctgtggaggagaaccatccctttaccttgcgggctccaatccaaaggatctatggagtgaggtacacagaaacttggtcatttctgccctcgcttacctgcactggtgacgctgcccctgctattcagcatatatgccttaagcatacaacttgttttcaggatgtggtggtggatgttgattgcgctgagaataccaaggaagatcagcttgccgaaatttcttacagatttcagggcaaaaaggaagctgatcaaccttggattgttgtcaatacatccacgctttttgacgagctggagctcgatcccccggaaatcgagcctggcgtgttgaaggtgctgcgtactgagaagcaatatcttggggtgtatatctggaatatgcgggggtcggacggcaccagtacctatgccacctttctagtaacctggaagggtgacgagaagacccggaaccccacccctgctgtgactccgcagcctaggggtgcggagttccacatgtggaattaccattcccatgtgttttccgtgggtgatacgttcagtctggctatgcacctccagtataagatacacgaagctccttttgatcttctactggaatggctgtatgtgccgattgaccctacgtgtcagcccatgagattgtattcgacgtgtttgtatcatccaaatgctccacagtgtttgagtcatatgaacagcggatgcactttcaccagtcctcatctagcgcagcgcgtggcttccactgtctatcagaactgtgagcacgcagacaactatacagcctactgtctggggattagccacatggagccaagctttgggctgattcttcacgacggtggcaccacacttaagttcgtggacactcccgagtctttaagtgggttgtatgtttttgtggtttatttcaatggacacgtggaagccgtggcttacactgtggtgagtactgtggatcacttcgtgaatgccatcgaggagcgggggtttcctcctacggcaggacagccccccgcgaccacaaagcccaaagagattacaccagtgaaccctggcacaagccccctgattaggtatgctgcctggacaggcgggcttgctgccgtggtgttgctgtgtctagtcatctttttgatctgcactgccaagcggatgcgggtcaaggcttatcgggttgacaagtctccgtataatcagtcgatgtattacgcaggccttcctgtggatgattttgaggactctgagtccacagacaccgaggaggagtttggtaatgctattggcggtagtcacggggggtcgtcatatacagtgtatatcgacaagactcgg

SEQ ID NO: 234 - RNA, 1869 nt, synthetic construct
  source 1..1869: mol_type = other RNA
atggggactgttaataagcctgtggtcggagtgttgatggggtttgggatcatcaccgggacattgaggatcacgaatcctgttcgtgcctcggtgttgcggtacgatgatttccacatagatgaggataagttggataccaattccgtttatgagccctattaccactctgaccacgccgaatcatcttgggtgaaccggggtgagtcttcgcgcaaggcttatgatcataattctccatacatatggccaagaaatgattatgatggtttcctggagaatgcccatgagcatcatggcgtttataaccaaggcagggggattgattctggagagcgtcttatgcagcctacccagatgtccgcccaggaggacctgggtgatgacactgggatccatgtgattccaactcttaatggtgacgatcgccataagattgtgaacgtggatcagaggcagtatggggacgtttttaagggcgatctcaatcctaagccgcagggacagaggctgatcgaggtttctgtggaggagaaccatccctttaccttgcgggctccaatccaaaggatctatggagtgaggtacacagaaacttggtcatttctgccctcgcttacctgcactggagatgctgctcccgctattcaacatatctgtctcaagcacaccacgtgcttccaggatgtggttgtagacgtcgattgcgctgagaataccaaggaggatcagctggctgagatcagttaccgcttccaggggaagaaggaagctgatcagccttggattgttgtgaatacgtctacactgtttgacgagcttgaactggaccctccagaaatcgagccaggtgtgttgaaagtgttgaggactgagaaacagtaccttggagtgtatatctggaatatgagaggttccgacgggacctctacatatgccactttcctcgtgacgtggaagggcgacgagaagactcggaatcccacgccggctgtgaccccacagccgcgtggggccgagtttcacatgtggaattatcattctcacgtgttctctgtgggcgacacgttcagtttggccatgcaccttcagtacaagatacacgaagccccttttgatcttctgctcgaatggctgtatgtgccaattgacccgacgtgtcagcccatgagattatactctacgtgtttatatcatccaaatgctccacagtgtttgagtcatatgaacagtgggtgtacgttcacaagtcctcatctagcgcagcgcgtggcttccactgtctatcagaactgtgagcacgcagacaactatacagcctactgtctggggattagccacatggagccaagctttgggctgattcttcacgacggtggcaccacacttaagttcgtggacactcccgagtctttaagtgggttgtatgtttttgtggtttatttcaatggacacgtggaagccgtggcttacactgtggtgagtactgtggatcacttcgtgaatgccatcgaggagcgggggtttcctcctacggcaggacagccccccgcgaccacaaagcccaaagagattacaccagtgaaccctggcacaagccccctgattaggtatgctgcctggacaggcgggcttgctgccgtggtgttgctgtgtctagtcatctttttgatctgcactgccaagcggatgcgggtcaaggcttatcgggttgacaagtctccgtataatcagtcgatgtattacgcaggccttcctgtggatgattttgaggactctgagtccacagacaccgaggaggagtttggtaatgctattggcggtagtcacggggggtcgtcatatacagtgtatatcgacaagactcgg

SEQ ID NO: 235 - RNA, 1869 nt, synthetic construct
  source 1..1869: mol_type = other RNA
atggggactgttaataagccagttgtgggagttctgatggggttcggtatcatcactgggactctcaggattaccaatcctgttcgcgcctctgttttacgctatgatgactttcatattgatgaggataagctcgacacaaactctgtgtacgagccttattatcatagcgatcatgcagagtcgtcatgggtaaataggggtgagagttcccgcaaggcttatgatcataacagtccttatatctggccaagaaatgattacgatggtttcttggagaatgcccatgagcatcatggtgtttacaaccagggtcggggtatcgactctggcgagagattgatgcaaccgacccaaatgagtgcgcaggaggacctaggcgatgataccgggattcacgtgattcctactctgaatggcgacgacagacacaagattgtcaatgttgatcagcggcagtacggggatgtgttcaagggtgacctcaatccgaagcctcaggggcagaggctcattgaggtttcggttgaggagaatcatccttttacactccgtgctcctattcagaggatttacggggtccggtatacagagacctggtcttttctgccgtcacttacttgcactggtgacgctgcccctgctattcagcatatatgccttaagcatacaacttgttttcaggatgtggtggtggatgttgattgcgctgagaataccaaggaagatcagcttgccgaaatttcttacagatttcagggcaaaaaggaagctgatcaaccttggattgttgtcaatacatccacgctttttgacgagctggagctcgatcccccggaaatcgagcctggcgtgttgaaggtgctgcgtactgagaagcaatatcttggggtgtatatctggaatatgcgggggtcggacggcaccagtacctatgccacctttctagtaacctggaagggtgacgagaagacccggaaccccacccctgctgtgactccgcagcctaggggtgcggagttccacatgtggaattaccattcccatgtgttttccgtgggtgatacgttcagtctggctatgcacctccagtataagatacacgaagctccttttgatcttctactggaatggctgtatgtgccgattgaccctacgtgtcagcccatgagattgtattcgacgtgtttgtatcatccaaatgctccacagtgtttgagtcatatgaacagcggatgcactttcaccagtccccacctagcccagcgggtggcctcgacggtgtaccagaattgtgagcatgctgacaactatacggcatactgcctcggaattagccacatggagccaagcttcgggctgattctgcatgacggtggaactacacttaaattcgtggacactcctgagtcgcttagcgggttgtacgtgtttgtagtgtatttcaatggtcatgttgaggcagtggcttataccgttgtcagcactgttgatcattttgtgaacgccattgaggagcgggggttcccgcctacggctgggcaaccccccgctacgactaagcctaaggaaattaccccggtgaatccaggtacctcgcctcttatcaggtatgcagcctggaccggtggtctggctgcagtcgtgctactatgcctcgtgattttcttgatctgcactgctaaacgcatgcgtgtcaaggcttatagggtggataaatccccctataaccagtctatgtactatgctggccttcctgtggacgacttcgaggattcggagtcgaccgatacagaggaggagtttggcaatgcgatcggggggagtcacgggggtagtagctacactgtgtatatcgataagacgagg

SEQ ID NO: 236 - RNA, 1869 nt, synthetic construct
  source 1..1869: mol_type = other RNA
atggggactgttaataagcctgtggtcggagtgttgatggggtttgggatcatcaccgggacattgaggatcacgaatcctgttcgtgcctcggtgttgcggtacgatgatttccacatagatgaggataagttggataccaattccgtttatgagccctattaccactctgaccacgccgaatcatcttgggtgaaccggggtgagtcttcgcgcaaggcttatgatcataattctccatacatatggccaagaaatgattatgatggtttcctggagaatgcccatgagcatcatggcgtttataaccaaggtcggggtatcgactctggcgagagattgatgcaaccgacccaaatgagtgcgcaggaggacctaggcgatgataccgggattcacgtgattcctactctgaatggcgacgacagacacaagattgtcaatgttgatcagcggcagtacggggatgtgttcaagggtgacctcaatccgaagcctcaggggcagaggctcattgaggtttcggttgaggagaatcatccttttacactccgtgctcctattcagaggatttacggggtccggtatacagagacctggtcttttctgccgtcacttacttgcactggtgacgctgcccctgctattcagcatatatgccttaagcatacaacttgttttcaggatgtggtggtggatgttgattgcgctgagaataccaaggaagatcagcttgccgaaatttcttacagatttcagggcaaaaaggaagctgatcaaccttggattgttgtcaatacatccacgctttttgacgagctggagctcgatcccccggaaatcgagcctggcgtgttgaaggtgctgcgtactgagaagcaatatcttggggtgtatatctggaatatgcgggggtcggacggcaccagtacctatgccacctttctagtaacctggaagggtgacgagaagacccggaaccccacccctgctgtgactccgcagcctaggggtgcggagttccacatgtggaattaccattcccatgtgttttccgtgggtgatacgttcagtctggctatgcacctccagtataagatacacgaagctccttttgatcttctactggaatggctgtatgtgccgattgaccctacgtgtcagcccatgagattgtattcgacgtgtttgtatcatccaaatgctccacagtgtttgagtcatatgaacagcggatgcactttcaccagtcctcatctagcgcagcgcgtggcttccactgtctatcagaactgtgagcacgcagacaactatacagcctactgtctggggattagccacatggagccaagctttgggctgattcttcacgacggtggcaccacacttaagttcgtggacactcccgagtctttaagtgggttgtatgtttttgtggtttatttcaatggacacgtggaagccgtggcttacactgtggtgagtactgtggatcacttcgtgaatgccatcgaggagcgggggtttcctcctacggcaggacagccccccgcgaccacaaagcctaaggaaattaccccggtgaatccaggtacctcgcctcttatcaggtatgcagcctggaccggtggtctggctgcagtcgtgctactatgcctcgtgattttcttgatctgcactgctaaacgcatgcgtgtcaaggcttatagggtggataaatccccctataaccagtctatgtactatgctggccttcctgtggacgacttcgaggattcggagtcgaccgatacagaggaggagtttggcaatgcgatcggggggagtcacgggggtagtagctacactgtgtatatcgataagacgagg

SEQ ID NO: 237 - RNA, 1869 nt, synthetic construct
  source 1..1869: mol_type = other RNA
atggggactgttaataagcctgtggtcggagtgttgatggggtttgggatcatcaccgggacattgaggatcacgaatcctgttcgtgcctcggtgttgcggtacgatgatttccacatagatgaggataagttggataccaattccgtttatgagccctattaccactctgaccacgccgaatcatcttgggtgaaccggggtgagtcttcgcgcaaggcttatgatcataattctccatacatatggccaagaaatgattatgatggtttcctggagaatgcccatgagcatcatggcgtttataaccaaggtcggggtatcgactctggcgagagattgatgcaaccgacccaaatgagtgcgcaggaggacctaggcgatgataccgggattcacgtgattcctactctgaatggcgacgacagacacaagattgtcaatgttgatcagcggcagtacggggatgtgttcaagggtgacctcaatccgaagcctcaggggcagaggctcattgaggtttcggttgaggagaatcatccttttacactccgtgctcctattcagaggatttacggggtccggtatacagagacctggtcttttctgccgtcacttacttgcactggagatgctgctcccgctattcaacatatctgtctcaagcacaccacgtgcttccaggatgtggttgtagacgtcgattgcgctgagaataccaaggaggatcagctggctgagatcagttaccgcttccaggggaagaaggaagctgatcagccttggattgttgtgaatacgtctacactgtttgacgagcttgaactggaccctccagaaatcgagccaggtgtgttgaaagtgttgaggactgagaaacagtaccttggagtgtatatctggaatatgagaggttccgacgggacctctacatatgccacctttctagtaacctggaagggtgacgagaagacccggaaccccacccctgctgtgactccgcagcctaggggtgcggagttccacatgtggaattaccattcccatgtgttttccgtgggtgatacgttcagtctggctatgcacctccagtataagatacacgaagctccttttgatcttctactggaatggctgtatgtgccgattgaccctacgtgtcagcccatgagattgtattcgacgtgtttgtatcatccaaatgctccacagtgtttgagtcatatgaacagcggatgcactttcaccagtcctcatctagcgcagcgcgtggcttccactgtctatcagaactgtgagcacgcagacaactatacagcctactgtctggggattagccacatggagccaagctttgggctgattcttcacgacggtggcaccacacttaagttcgtggacactcccgagtctttaagtgggttgtatgtttttgtggtttatttcaatggacacgtggaagccgtggcttacactgtggtgagtactgtggatcacttcgtgaatgccatcgaggagcgggggtttcctcctacggcaggacagccccccgcgaccacaaagcccaaagagattacaccagtgaaccctggcacaagccccctgattaggtatgctgcctggacaggcgggcttgctgccgtggtgttgctgtgtctagtcatctttttgatctgcactgccaagcggatgcgggtcaaggcttatcgggttgacaagtctccgtataatcagtcgatgtattacgcaggccttcctgtggatgattttgaggactctgagtccacagacaccgaggaggagtttggtaatgctattggcggtagtcacggggggtcgtcatatacagtgtatatcgacaagactcgg

SEQ ID NO: 238 - RNA, 1869 nt, synthetic construct
  source 1..1869: mol_type = other RNA
atggggactgttaataagccagttgtgggagttctgatggggttcggtatcatcactgggactctcaggattaccaatcctgttcgcgcctctgttttacgctatgatgactttcatattgatgaggataagctcgacacaaactctgtgtacgagccttattatcatagcgatcatgcagagtcgtcatgggtaaataggggtgagagttcccgcaaggcttatgatcataacagtccttatatctggccaagaaatgattacgatggtttcttggagaatgcccatgagcatcatggtgtttacaaccagggtcggggtatcgactctggcgagagattgatgcaaccgacccaaatgagtgcgcaggaggacctaggcgatgataccgggattcacgtgattcctactctgaatggcgacgacagacacaagattgtcaatgttgatcagcggcagtacggggatgtgttcaagggtgacctcaatccgaagcctcaggggcagaggctcattgaggtttcggttgaggagaatcatccttttacactccgtgctcctattcagaggatttacggggtccggtatacagagacctggtcttttctgccgtcacttacttgcactggagatgctgctcccgctattcaacatatctgtctcaagcacaccacgtgcttccaggatgtggttgtagacgtcgattgcgctgagaataccaaggaggatcagctggctgagatcagttaccgcttccaggggaagaaggaagctgatcagccttggattgttgtgaatacgtctacactgtttgacgagcttgaactggaccctccagaaatcgagccaggtgtgttgaaagtgttgaggactgagaaacagtaccttggagtgtatatctggaatatgagaggttccgacgggacctctacatatgccactttcctcgtgacgtggaagggcgacgagaagactcggaatcccacgccggctgtgaccccacagccgcgtggggccgagtttcacatgtggaattatcattctcacgtgttctctgtgggcgacacgttcagtttggccatgcaccttcagtacaagatacacgaagccccttttgatcttctgctcgaatggctgtatgtgccaattgacccgacgtgtcagcccatgagattatactctacgtgtttatatcatccaaatgctccacagtgtttgagtcatatgaacagtgggtgtacgttcacaagtcctcatctagcgcagcgcgtggcttccactgtctatcagaactgtgagcacgcagacaactatacagcctactgtctggggattagccacatggagccaagctttgggctgattcttcacgacggtggcaccacacttaagttcgtggacactcccgagtctttaagtgggttgtatgtttttgtggtttatttcaatggacacgtggaagccgtggcttacactgtggtgagtactgtggatcacttcgtgaatgccatcgaggagcgggggtttcctcctacggcaggacagccccccgcgaccacaaagcccaaagagattacaccagtgaaccctggcacaagccccctgattaggtatgctgcctggacaggcgggcttgctgccgtggtgttgctgtgtctagtcatctttttgatctgcactgccaagcggatgcgggtcaaggcttatcgggttgacaagtctccgtataatcagtcgatgtattacgcaggccttcctgtggatgattttgaggactctgagtccacagacaccgaggaggagtttggtaatgctattggcggtagtcacggggggtcgtcatatacagtgtatatcgacaagactcgg

SEQ ID NO: 239 - RNA, 1869 nt, synthetic construct; identical to SEQ ID NO: 170
  source 1..1869: mol_type = other RNA

SEQ ID NO: 240 - RNA, 1869 nt, synthetic construct
  source 1..1869: mol_type = other RNA
atgggcactgtcaacaagcccgtagtgggggtcctgatggggttcgggatcatcacggggactctgcggatcactaatccggttagggcctctgtgctgcgctatgacgacttccacattgatgaggataagctggacacaaatagcgtatatgagccatattaccatagcgatcatgctgagtcttcctgggtgaataggggtgagtcttcccgcaaggcttatgatcacaatagtccatacatctggccccggaatgactatgatggctttcttgagaacgcccacgagcatcatggtgtttacaaccaggggcgcggaattgacagtggagagaggttgatgcagcctactcagatgtccgctcaggaggatctgggcgacgacactggtatccatgtgattccgaccttaaacggtgatgaccggcataagatcgtgaatgtggatcaaaggcaatatggtgatgtgtttaagggggatcttaatcctaaacctcaaggacagaggttgattgaggtctctgtggaggaaaatcatcctttcactctgcgtgcgcccatacagagaatctatggagttcgatacaccgaaacctggtcttttctgcctagtctgacatgcactggggacgccgcgccggcgattcagcacatatgcctgaagcataccacctgcttccaggacgtggtggtggatgtggattgtgccgagaataccaaggaggatcaactcgccgaaatctcatacaggttccagggcaagaaggaggccgaccagccgtggatcgtcgtcaatacaagtactctttttgacgagctggagctcgatccacctgagatcgagccaggtgtgctgaaagtgttgcgtactgaaaaacagtatctcggagtttatatttggaacatgaggggctctgatggtacaagcacatacgcaacctttctggtgacatggaaaggcgacgagaaaactcgtaaccccacccctgctgtgactccacagcctcggggggccgagtttcacatgtggaactaccattctcacgtgtttagtgtgggtgacacattttccctcgctatgcacctgcagtacaagatccatgaagccccctttgatcttctgctggagtggctctacgtgccgatagatccaacttgtcagcccatgaggttgtacagtacgtgcttgtaccaccccaacgccccccaatgtctgagccatatgaactccgggtgcacattcacgtcaccccatcttgcccagcgtgttgcgtccacggtgtatcagaactgcgagcacgcagataattacaccgcctattgccttggcatctcacacatggaacctagttttggcctgatcctccatgacggcggaactactctcaaattcgtggatacccctgagtctctgtccggcctgtacgtgtttgttgtatacttcaacggccatgtggaggctgtggcgtacactgttgtgagcactgtcgatcactttgtgaatgctatcgaggaaagaggctttcctccgacagctggacagccgcctgccaccactaagcccaaggagatcacacctgtcaatcccggaacctcgccactgataaggtatgccgcctggaccggcggcttggccgctgtggtgcttttgtgtttagttatttttttgatttgcactgcgaaacgcatgcgagttaaggcataccgggtggataagtcgccctacaaccagtctatgtactatgccgggctccccgtggacgattttgaggactcagagagcacggacacagaggaggagttcgggaacgcgataggggggtcccacggggggtcctcctacaccgtgtacatagacaagactcgg

SEQ ID NO: 241 - RNA, 1869 nt, synthetic construct
  source 1..1869: mol_type = other RNA
atgggaaccgtcaacaagcctgtggtgggagtcctaatggggttcggtattatcacgggtaccctgaggatcaccaaccccgttagggcttctgtcctacgctatgacgacttccatatcgatgaagataaactagatactaatagcgtgtatgaaccgtactaccacagcgaccatgctgagtcgtcgtgggtcaaccggggtgaatcttctaggaaggcttacgatcataattctccatacatctggccaaggaatgactatgatggttttctcgagaacgcgcacgaacatcacggcgtttacaaccaggggcgcggaattgatagtggtgagaggttgatgcaaccaactcagatgtccgctcaagaagatttaggcgacgatactgggattcatgtgattccgaccttgaatggcgatgaccgccataagatcgtgaatgtggatcaaaggcaatacggtgatgtgtttaaaggagatcttaatccaaagcctcaaggtcagaggctgattgaggtctctgtggaggagaaccacccctttactctgcgcgcgcctattcagaggatatatggcgttcggtataccgaaacttggtcgttcctgcccagtctaacatgcaccggggatgcggctcccgcaatccagcatatttgtctgaagcatacaacctgcttccaggatgtggtggtggatgttgactgtgcagagaacactaaggaggaccagcttgctgaaatttcttatagatttcagggcaagaaagaggcggaccagccttggattgtcgttaacacgagtactttgtttgatgagttggagctggatccgcctgagattgaacctggggtgctgaaagtgctgcgcactgaaaagcagtatcttggagtctatatatggaacatgaggggcagcgatgggacaagcacgtatgccacgtttctggtgacttggaagggcgacgaaaagaccagaaacccgacccctgctgtgacaccacagccgagaggggcggagtttcacatgtggaattatcattctcatgtgtttagtgtaggggacaccttctccctcgctatgcacttgcagtataagatccacgaagccccattcgatctgttgctggagtggctttacgtgcccattgacccgacttgtcagcccatgagactgtacagtacctgtttgtaccatcccaatgcaccccaatgtctctcgcatatgaactctggatgcactttcacctcaccccaccttgcccagcgggtggcctcgaccgtgtaccagaactgcgagcacgcagataactacaccgcctattgcctagggatctcccatatggaaccttcgtttggattaattctccatgatggcgggactactcttaagtttgtcgacacccctgaaagtctgtcaggcctctacgtgttcgtggtgtacttcaacgggcatgtggaggccgtggcttacaccgttgtgagcaccgttgatcacttcgtgaacgctatcgaggagagaggctttccgccaacggctggtcagccccctgcaacaaccaagccaaaggagatcacacccgtgaaccccggcaccagccctttgatccgttacgcagcatggaccggggggttggcagctgtggtgctgttgtgtctggttatcttccttatctgcaccgccaagcggatgcgggtcaaggcgtaccgggttgataagagtccttacaatcagtcaatgtactatgccggacttcctgtcgacgactttgaggattcagagtcaaccgacacagaggaggaattcggcaatgcgataggtggctcacacggtggctcatcctataccgtgtatattgacaagactagg

SEQ ID NO: 242 - RNA, 1869 nt, synthetic construct
  source 1..1869: mol_type = other RNA
atgggcactgtcaacaagcctgtggttggagtgctgatggggtttggtataatcacaggtaccttgaggataaccaatcctgttagggcctctgtgctgcgctatgatgacttccacattgatgaggataaactagacactaacagcgtgtacgaaccatattaccatagcgaccatgccgagtcctcctgggtgaataggggtgagtcttccaggaaggcctacgatcacaatagtccatacatctggccccggaatgactatgatggctttcttgagaacgcacacgagcatcacggtgtttataaccagggtcgcggaattgacagtggtgagaggttgatgcagcctactcagatgtccgctcaggaggacttgggcgacgatactgggatccatgtcatcccgaccctgaacggtgatgacagacataagattgtgaatgtggaccagaggcagtatggcgatgtgtttaaaggggacctgaatccaaagcctcagggacagaggctgattgaggtctctgtggaggagaatcatcccttcactctgcgtgctcccattcagagaatttacggcgttcggtacactgaaacttggtcttttctgcctagtcttacatgtaccggagacgccgctccggccatccagcacatatgcctgaagcacaccacctgcttccaggatgtggtggtggacgtggactgtgcagaaaacaccaaggaagaccaacttgctgaaatcagctaccggtttcagggcaagaaggaagcagaccaaccgtggattgtcgtcaacacatccactttgtttgacgagctggagctggatcctcccgagatcgaacccggcgtgctgaaagtgcttcgtactgaaaagcagtatctcggagtttatatttggaacatgaggggtagtgacggtacaagcacgtatgctacctttctggtgacttggaagggcgacgagaagacgcggaaccctacccctgctgtgacgccacagcctaggggagccgagtttcacatgtggaactaccattctcacgtgtttagtgtgggagatacgttttccctggctatgcacctccagtacaagatccacgaagcgcccttcgatcttctgctggagtggctctacgtgcccatagatccaacttgtcagcccatgagattgtacagtacatgcctgtaccatccaaatgcccctcaatgtctgagccatatgaactctggatgcactttcacgtcaccccatcttgcccagcgggttgcgtctacggtgtaccagaactgtgaacacgctgataattacaccgcctactgcctagggatctcccatatggaacctagtttcggtctaatcctccatgacggcggcaccactctcaagttcgtggatacacctgaaagcctgagcggtctctacgtgtttgttgtctactttaacgggcacgtagaggccgtggcttacactgttgtgtcgaccgtcgatcattttgtgaatgcgatcgaggagcgcgggtttcctccgacagccggacagccccctgccacgactaagcctaaggagattacccctgtgaatccaggaaccagtcccctgattcggtatgctgcgtggaccggcggtctggccgctgtggtgctgttgtgtctggtaatctttcttatttgcactgccaaacgcatgcgagtcaaggcttatcgggtggataagtcgccctacaaccagtctatgtactatgccggacttcccgtggacgattttgaggactcagaatctacggacacagaggaggagtttgggaacgcgataggaggatcccatgggggctcctcctatactgtgtatatagataagactcgt

SEQ ID NO: 243 - RNA, 1869 nt, synthetic construct
  source 1..1869: mol_type = other RNA
atgggaactgtcaataagcctgtggtgggagtgctgatgggattcggtatcatcactggaaccctgaggatcaccaatcccgttcgcgcttctgtgcttcgctatgacgatttccacatcgacgaagataagctagacactaacagcgtgtacgaaccgtactaccacagcgaccacgctgagtcctcttgggtgaaccggggtgaatcttctaggaaggcttacgaccataatagtccttacatctggccacggaacgactatgatggtttcctcgagaacgcacacgagcatcatggcgtttacaaccaggggcgcggaattgacagcggtgagaggttgatgcagcctacccaaatgtccgctcaggaggatctgggagacgacacgggtattcatgtgattccgaccttaaatggcgacgatcgccataagatcgtgaatgtggatcaaaggcaatatggtgatgtgtttaaaggtgatcttaatccgaaaccgcaagggcagaggttgattgaggtctctgttgaggagaaccaccccttcactctgcgcgctccaattcagcggatttacggagttcggtacacggagacttggtcttttctgcccagtctcacatgcacaggggatgccgctcctgccattcagcacatatgtctgaagcatacaacatgctttcaggatgtggtggtggatgtggattgtgcagagaacactaaggaagatcagcttgcagagatttcatacaggtttcagggcaagaaagaggcagaccagccctggattgtcgtcaacacaagtacattgttcgacgagctggagctggatccgcccgaaatcgagccaggggtgctgaaagtgctgcgcacagaaaagcagtatctgggtgtttatatatggaacatgaggggtagcgatggtaccagcacctatgcaacatttctggtgacctggaaaggtgacgaaaagaccagaaaccccactcccgctgtgaccccacagccacggggagcggagtttcacatgtggaattatcattcccatgtgtttagtgtaggggacactttctccctcgctatgcatctccagtataagatccatgaagcaccgtttgacttgttgctggagtggctttacgtgcccattgatccaacttgtcagcccatgagattgtatagtacgtgcttgtaccatcccaatgcaccccagtgtctctcacatatgaactccggatgtactttcacgtcacctcaccttgcccagcgggtggcttcgaccgtgtaccagaattgtgagcacgcggataactacaccgcctattgcctcggtatctcccacatggaacctagtttcggtctgattctccatgatggcggaactacccttaaattcgtggacacccctgagagtctgtctggcctctatgtattcgtggtgtacttcaacggacatgtggaggccgtggcgtacactgttgtgagcaccgtggaccacttcgtgaatgcgattgaggaacgtggctttccccctactgctggtcagccccctgctaccaccaagcccaaggagatcacgcccgtaaacccaggaaccagccctctgattcggtacgctgcatggaccggaggattggccgcagtggtgctgctgtgtctggttattttccttatttgcactgccaagcggatgcgagttaaggcctatcgggttgataaatcaccatacaatcagtcaatgtactatgccggactccccgtggatgattttgaggattcagagtcaaccgacacagaggaggagtttgggaatgcgataggagggagtcacggtggctcctcctataccgtgtatattgacaagactagg

SEQ ID NO: 244 - RNA, 1869 nt, synthetic construct
  source 1..1869: mol_type = other RNA
atgggcactgtcaataagcctgttgtaggggtgttaatggggttcggtatcatcacgggaacattgcggattactaaccctgttagggcttctgtgctgcgctatgatgactttcacatcgatgaagataaactagacaccaacagcgtgtatgagccatactaccatagcgatcatgccgagtcaagttgggtgaacaggggtgagtcttcccgaaaggcttacgatcataatagtccatatatctggccacggaatgactatgacggctttttggagaacgcacacgagcatcacggtgtttacaaccagggccgcggcattgacagcggtgagaggttgatgcagccaactcagatgtccgctcaggaggatttgggcgacgacactgggatccatgtgattccgaccttaaatggggatgaccgccataagattgtgaatgtggaccagagacagtacggcgacgtttttaagggcgacctcaatccaaagcctcaaggacagaggctgattgaggtgtctgtggaggagaaccaccctttcactctgcgtgctcccatccagagaatctatggcgttcggtataccgaaacttggtcttttctgcctagtctgacatgtaccggagacgcagcgcctgcgattcagcacatatgcctaaagcacaccacctgctttcaggatgtggtggtggatgtggactgcgccgagaataccaaggaagaccaactcgctgagatctcttataggtttcagggcaagaaagaggccgaccaaccgtggatcgtcgtcaacacaagtactttgtttgacgagctggagctggatccacctgagatcgagcccggcgtgctgaaagtgctccgtactgaaaaacagtaccttggagtttatatttggaacatgagggggtcagacgggacaagcacgtacgctacatttctggtgacttggaagggggatgaaaaaactcgaaaccccaccccggctgtgactccacagcctaggggggccgagtttcacatgtggaactaccattctcacgtgtttagtgtgggagatacattttccctcgctatgcacctccagtataagattcacgaagccccctttgatctcctgctggaatggctctatgtgcccatagaccccacttgccagcccatgaggctgtactcaacgtgcttataccatcccaatgccccccagtgtctcagccacatgaactctggatgcacttttacgtcaccccatcttgcccagcgggttgcttcaacggtgtaccagaattgtgagcacgccgataattacaccgcctactgtctcggaatttcccacatggaacccagttttggcctgatcctgcatgatggtggaacaacgctcaagttcgtggatacccctgagtcgttgtccggcctatacgtgtttgttgtgtacttcaacggacatgtggaggccgtggcatacactgttgtgagcaccgtcgaccatttcgtgaatgcgatcgaggagagaggctttcctccaaccgccggacaaccccctgccacaaccaagcctaaggagatcacacctgtgaatcctggcacctccccactgattcggtacgctgcttggacaggcggtctggccgctgtggtgctcttgtgtttagttattttccttatttgcactgcgaagcgcatgcgggtgaaagcatatcgggtggataagtcgccttacaaccagagtatgtactatgccggactccctgtggacgattttgaggactcagaatccacggacaccgaggaggagtttgggaacgctataggagggtcccacgggggctcctcctataccgtttacatagacaagactagg

SEQ ID NO: 245 - RNA, 1869 nt, synthetic construct
  source 1..1869: mol_type = other RNA
atgggcactgtcaacaagccagtggtgggggtgctaatggggttcggtatcatcacgggaacgttgaggatcacaaaccctgttcgcgcttctgtgctgcgctatgatgacttccatatcgatgaggataaactagatacaaatagcgtgtatgagccatactaccacagcgaccatgctgagtcaagttgggtcaataggggtgagtcttcccgtaaggcatatgaccacaatagtccatacatctggcctcggaatgactatgatgggttcctggaaaatgcccacgagcatcatggtgtttacaaccagggtcgcggtattgacagtggtgagaggctgatgcagcctactcagatgtccgctcaagaggatctgggcgatgacaccggcattcatgtgattccgaccttgaacggtgatgaccggcacaagatcgtgaatgtggaccagaggcagtacggcgatgtgtttaagggcgaccttaatcccaagcctcaaggccagaggttgattgaggtgtctgtggaggagaaccatccattcaccctgcgtgctcccattcagagaatctatggagttcggtataccgaaacttggtcttttctgcctagtctgacatgtacgggtgatgccgctccggccattcagcacatatgcctgaagcataccacgtgttttcaggacgtagtggttgatgtagactgtgcggagaataccaaggaggaccagctcgccgagattagctataggtttcagggcaagaaggaagcggaccaaccgtggattgtcgtcaataccagtacactgtttgacgagctggagttggacccccccgagatcgaacccggcgtgttaaaagtgcttcgtactgaaaagcagtatctcggagtgtatatatggaatatgaggggctccgatggtacaagcacatacgctacatttctggtgacatggaagggcgacgagaagaccagaaaccccacccctgctgtgaccccacagccaaggggggccgagtttcacatgtggaattaccattctcatgtgtttagtgtgggggataccttctctctcgctatgcaccttcagtacaagattcacgaggccccctttgatctcttactggagtggctctacgtgcccatagatccgacttgtcagcccatgagattgtacagtacctgcttgtaccatccgaacgccccccaatgtctgtctcatatgaactctgggtgcactttcacgtcaccacatcttgcccagcgggttgcgtccacggtgtaccagaactgcgagcatgcagataattacactgcctactgtctaggcatcagccacatggagcctagtttcggtctgattctgcatgatgggggcaccactctcaagttcgtggatacgcctgagagcctaagcggtctttacgtgtttgttgtttactttaacggacacgtggaggccgtggcctacactgttgtgagcaccgtggatcatttcgtgaacgccatcgaggaaagaggctttcctccaaccgctggacagccccctgccacaaccaagcctaaggagatcacccctgtgaatcccgggacctccccactgattcggtatgccgcatggacagggggtttagcggctgtggtgctgttgtgtctagtaatttttcttatttgcactgccaagcggatgcgagtgaaggcttatcgggtggataaaagtccctacaatcagtctatgtactatgccggacttcctgttgacgactttgaggactcagagtcgaccgacacagaggaggaatttgggaacgcaataggagggtctcacggaggctcctcctatactgtgtatatagacaagactagg

SEQ ID NO: 246 - RNA, 1869 nt, synthetic construct
  source 1..1869: mol_type = other RNA
atggggactgtcaataagcctgtggttggggttttaatggggtttggtatcattactgggacactcaggatcaccaatcctgttagggcctcagtgctgcgctatgatgactttcacatcgatgaggataaactagataccaacagcgtgtatgaaccgtactaccacagcgaccatgctgagagttcctgggtaaatcgcggtgaatctagccgcaaggcttatgatcataattctccatatatctggccacggaatgattatgatggctttcttgagaacgcccacgagcaccacggagtctacaaccagggccgcggaattgacagtggtgaacgtttgatgcagcccactcaaatgtccgcccaggaggatctgggcgacgacactgggatccatgtgattccgaccttgaacggtgacgaccggcataagattgtgaatgtggatcagaggcagtatggcgacgtgttcaagggcgaccttaatcctaagcctcagggacagaggttgattgaggtgtctgtggaggaaaaccatcctttcacactgcgggctcccattcagagaatctatggtgttcggtataccgaaacttggagctttctgcccagtctgacatgtaccggggacgccgccccggccattcagcacatctgcctgaagcatacgacatgcttccaggatgtggtggtggatgtcgactgtgccgagaataccaaggaggatcaactcgctgagatcagctatcgatttcagggcaagaaggaggctgaccaaccgtggatcgtcgtcaatacaagtactctgtttgacgagctggagctcgatccacccgagattgagcccggcgtgttgaaagtccttcgtacggagaagcagtacctcggagtgtatatctggaacatgcgggggagcgacggtacaagtacgtacgctaccttcctggtgacatggaaaggtgacgagaaaacaagaaaccccacccctgctgttactccacagcctaggggtgctgagtttcacatgtggaattaccacagccacgtgtttagtgtgggagataccttctccctggctatgcatctccagtacaagatccacgaggctcccttcgatttactgctggagtggctctacgtgcctattgatccaacgtgtcaaccaatgagattgtacagtacgtgcttgtatcaccccaacgcaccccaatgtctgtctcatatgaattctgggtgcactttcacatctccccatcttgcccagcgggttgcctcaacggtataccagaactgcgagcacgcagacaactacaccgcctactgcctgggtatctcacatatggaacctagtttcggcctgattctccatgacggcggcactactctcaaattcgtggatacgcctgagagcctgagcggtctctacgtgtttgttgtgtactttaacggacacgtggaggccgttgcctacaccgttgtgagcaccgtggaccacttcgtgaacgcgattgaggaaagaggctttcctccgaccgctggacagccccctgccaccaccaagcctaaggagattacacccgtgaacccgggaacctccccactgattcggtatgctgcttggaccggggggctggccgccgtggtgctgttgtgtctggtaatttttcttatttgcactgccaaacgcatgcgagtgaaggcttatcgagtggataagtcgccttacaatcagtcgatgtactatgctggtctccctgtggacgattttgaggattcagaatccactgatacagaggaggaattcgggaacgcgataggagggtcccacggggggtcgtcctataccgtgtacatagataagactagg

SEQ ID NO: 247 - RNA, 1869 nt, synthetic construct
  source 1..1869: mol_type = other RNA
atgggcactgtcaataagccagtagtgggggtcctgatggggtttggtattattactggcacgctcaggataactaaccctgtgagggcctctgtgctgcgctatgacgactttcacatcgatgaggacaaactagataccaacagcgtgtatgagccatactaccattctgaccatgcggagagtagttgggtgaataggggtgagtcttcccgcaaggcttatgaccacaatagtccatatatctggcccagaaatgactatgatggctttcttgagaacgcccatgagcatcacggtgtttacaaccagggccgcgggattgacagtggtgaaaggttgatgcagcctacccagatgtctgcccaggaggacctgggcgacgacactgggatccatgttattccgactcttaatggcgacgatcgtcacaagatcgtgaatgtggatcagaggcagtatggcgatgtgtttaagggtgaccttaatccaaagcctcagggacagaggttgattgaggtgtcggtggaggaaaaccatccattcactctccgtgcccccattcagagaatctatggagtacggtataccgagacttggtcttttctgcccagtcttacgtgtaccggggacgccgccccggccatccagcacatctgcctgaagcatacaacatgctttcaggatgtggtggtggacgtggattgtgcagagaacaccaaggaggatcaactcgctgaaatctcttacaggtttcagggcaagaaggaagcagaccaaccttggattgtcgtgaatacgagtactctgttcgacgagctggagctcgatcctcccgagatcgagcccggcgtgctgaaggtgctacgtactgaaaaacagtatctcggagtatatatttggaacatgagggggtcagatggtacgtcaacgtacgctacttttctggtgacgtggaagggcgacgagaagactcgaaatcccactccggcagtgactccacagcctaggggagccgagtttcacatgtggaactaccatagccacgtgtttagtgtgggagatacgttttccttggctatgcacctccagtataagattcacgaggcccccttcgatcttttactggagtggctctacgtgcccattgatcccacttgtcagcctatgagactgtattctacgtgcctgtatcatcctaacgcccctcaatgtctcagccatatgaattctggatgcactttcacgtcaccccatcttgcccagcgggttgcgtccacggtgtaccagaactgtgagcacgcagataattacaccgcctattgcctaggcatctcacacatggaaccttcattcggcctgatcctgcatgatggtggcactaccctcaagttcgtggatacccctgagagcctgagtggcctatacgtgttcgttgtctacttcaatggacatgtcgaggccgtggcctacacagttgtgagcaccgtcgaccatttcgtgaatgcgatcgaggaaagagggtttcctccaaccgctggacaaccccctgcgacaactaagcctaaggagatcacacccgtgaatcccggaacctcgcccctgattcgctacgcggcctggaccggcggtctggccgcggtggttctgctgtgtttagtaatttttctcatctgcaccgccaagcggatgcgggtgaaggcttaccgggtggacaagtcgccttacaaccagtctatgtactatgccggattgcctgtggacgattttgaggactcagagtctacggacacagaggaggagtttgggaacgcgataggagggtcccatgggggctcctcctacaccgtgtacatagataagactagg

SEQ ID NO: 248 - RNA, 1869 nt, synthetic construct
  source 1..1869: mol_type = other RNA
atgggcactgtcaacaaaccagtggtgggggtcctgatggggttcggtatcatcacgggaacgttaaggataactaaccccgtcagggcctctgttctgcgatatgatgacttccatatcgacgaggataaactagataccaacagcgtgtatgagccatactaccacagcgatcatgctgagtcatcctgggtgaacaggggtgaatctagccgcaaggcttatgatcataatagtccctatatttggccacggaatgactacgatgggtttcttgagaatgcccacgagcatcacggtgtttacaaccagggccgagggattgacagcggagagaggctgatgcagcctactcagatgagtgctcaggaggatctgggcgacgacactgggattcatgttattccgaccttaaacggtgatgaccggcataagatcgtgaatgtggatcaaaggcagtacggcgatgtgtttaagggcgaccttaatcccaaacctcaggggcagaggttgattgaggtgtctgtggaggagaaccaccctttcacactgcgggctcccattcagagaatctatggagttcggtacaccgaaacttggtcttttctgcccagtctgacatgcactggagatgccgctccagccattcagcacatctgcctgaagcacaccacctgtttccaagacgtggtggtggatgtagactgtgccgagaataccaaggaggatcaacttgccgagatctcttacaggtttcagggcaagaaagaggccgaccaaccttggatcgtcgtgaacacgagtactttattcgatgaactggagctggatccccctgagattgagcccggggttctgaaagtgcttagaactgaaaagcagtatctgggagtttatatctggaacatgagggggtccgatggtacgagcacgtacgccacattcctggtgacatggaagggcgacgagaagaccagaaaccccacccctgctgtgaccccgcagcctaggggggcggagtttcacatgtggaattatcattctcacgtgtttagcgtgggagacacattttccctggctatgcaccttcagtacaagattcacgaagccccttttgatctcctgctggaatggctctacgtgcccatagatccaacttgtcagccgatgagactgtacagtacgtgcctgtatcatcccaacgctccccagtgtctttctcatatgaactccggatgcactttcacgagtcctcatcttgcccagcgggttgcctccacggtgtaccagaactgtgagcacgcagataattacactgcctactgccttggcatctcccacatggaacctagttttgggctcatcctccatgatggcggcacaactcttaagttcgtcgataccccggagagcctcagcggtctctacgtgtttgttgtctacttcaacgggcatgtggaggctgtggcctacaccgtggtgagcaccgtcgatcatttcgtgaacgcgatcgaggaaagaggctttcctccgaccgctgggcagccccctgccacaaccaaacctaaggagattacacctgtgaacccagggacctctccattgattcggtatgctgcttggaccggaggtctggcggctgtggtcctgttgtgtttagtgatatttcttatttgcacagccaaacgcatgcgagtgaaggcatatcgcgtggataagtcgccttacaaccagtctatgtactatgccggcctccccgtggacgattttgaggactcagaatccacggacacggaggaggagtttggcaatgctataggagggtctcacgggggctcctcctataccgtctatatagacaagactcgg

SEQ ID NO: 249 - RNA, 1869 nt, synthetic construct
  source 1..1869: mol_type = other RNA
atgggcactgtcaataagccggttgtgggcgtgttgatggggttcggtatcatcactggaacattgaggataacgaaccctgtacgagcgtctgtgctgcgctatgacgacttccatatcgatgaggataagctagatactaacagcgtctatgagccttattaccatagcgatcatgctgagtcatcatgggtgaacaggggtgagtcttcccgcaaggcttatgatcataatagtccatacatctggccacggaatgactatgatggctttctggagaatgcccacgagcatcacggtgtttataaccagggccgcggaattgacagtggtgagaggcttatgcagcctactcaaatgtccgctcaggaggatctgggcgacgacactggaatccatgtgattccgactttaaatggtgatgaccgccataagatcgtgaatgtggatcagaggcagtacggcgatgtatttaagggcgaccttaaccctaagccacagggccagaggttgattgaggtgtctgtggaggaaaatcatcctttcactctgcgagctccgattcagagaatctatggcgttcgttacaccgaaacttggtccttccttcctagtctgacctgcactggggacgctgctcctgccatccagcacatatgcctgaagcacacgacatgcttccaggacgtggtggtggatgtagattgtgcagagaacaccaaggaggatcaactggctgagatctcatataggtttcagggaaagaaggaggcagatcagccttggatagtcgtcaacacgagtactctctttgacgaactcgagctggatcctcccgagatcgaaccgggcgtgctgaaagtgcttcgtactgagaagcagtatctcggagtttatatctggaatatgagggggtccgatggtaccagcacgtacgcaacctttctggtgacatggaagggcgacgagaagactagaaaccccactcctgctgtgactcctcagcctaggggggccgagtttcacatgtggaattaccattcccacgtgtttagtgtgggagatacatttagtctcgctatgcacctccagtacaagattcacgaggccccctttgacttgctgctggagtggctttacgtgcccatagaccccacttgtcaacccatgaggctgtatagtacctgcctgtatcatccaaacgccccccaatgcctgagccatatgaactctggatgtacttttacaagtcctcatcttgcccagcgggttgcgagtacggtgtatcagaactgcgagcatgcagataattacactgcctattgcctaggaatctcccacatggaacctagtttcggcctgatcctgcatgacggtggaactactcttaagttcgtggatacccctgagagcctgagcggcctctatgtgttcgttgtctactttaacggacacgtggaggccgtggcttatacagttgtgagcaccgttgaccatttcgtgaacgcgatcgaggagagaggctttcctccgaccgctgggcagccccctgccacaaccaagcctaaggagatcactcctgtgaacccggggaccagcccactgatccgatatgctgcctggaccggcggtctggcagccgtggtgctgttgtgtttagttatcttcctcatttgcactgcgaagcgcatgcgagtgaaggcatatcgggtggacaagtcgccctacaatcagtctatgtactatgctggactccctgtcgatgattttgaggactcagaatctacagacacagaggaggagttcggaaacgcgataggtggatcccacggggggtctagctataccgtttacatagataagactagg

SEQ ID NO: 250 - RNA, 1869 nt, synthetic construct
  source 1..1869: mol_type = other RNA
atgggtacggtcaacaagcctgtggtcggggtgctgatggggttcggtatcatcacgggaaccttgaggatcacgaaccctgttagggcctctgtgctgcggtatgatgacttccacatcgatgaagataagctggacaccaacagtgtgtatgagccatattaccatagcgaccatgccgagtcatcctgggtgaataggggcgaatcttccaggaaggcctatgatcataatagtccatatatctggcccagaaatgactatgatggctttttggagaacgcccacgagcatcacggtgtttacaaccagggccgcggaattgactccggtgagaggttgatgcagcctactcagatgtccgcccaggaggatctgggcgacgatacaggaatccatgttattcctaccttaaacggtgacgaccggcataagatagtgaatgtggatcagaggcagtacggcgatgtttttaagggcgaccttaatccaaaacctcagggtcagaggttgattgaggtgtctgtggaggagaaccatcctttcactctgcgagctcccatccagcggatctatggggttcggtataccgagacttggtcttttttgcctagtctgacatgtactggcgacgccgccccggccattcaacacatatgtctgaagcataccacctgcttccaggacgtggtggtggatgtagactgcgcagagaatactaaggaggatcaactcgctgagatctcttacaggtttcagggtaagaaggaggctgatcaaccgtggatagtcgtcaacacgagtactctgttcgacgaactggagctggatcccccggagatcgagcccggggtgctgaaagtgcttcgtactgagaaacagtacctcggagtttatatttggaacatgagggggtctgatggtacaagcacgtacgctacctttctggttacatggaagggcgacgagaagactagaaatcccacccctgctgtgactccacagcctaggggggccgagtttcacatgtggaattatcattctcacgtgtttagtgtgggagatacatttagtctggctatgcacctgcagtacaagatccatgaagcccccttcgatttactgctggagtggctctacgtgcccatcgatccaacttgtcagccaatgagattgtacagtacgtgcctgtaccatcccaacgcccctcagtgtttgagccatatgaattctggatgtacttttacgtccccccatctcgcccagcgagttgcgtccacggtgtaccagaactgtgagcacgcagataattataccgcctactgtctgggcatctcacacatggagcctagtttcgggctgatccttcatgatggtggaaccacactcaagttcgtagatacccccgaatccttgagcggcttgtacgtgttcgttgtatacttcaacggacatgtcgaggccgtggcctacactgtcgtgagcaccgttgatcatttcgtgaacgcgatcgaggagagggggtttcctccgacggctggacagccccccgccacaaccaagcctaaggagatcacgcctgtcaatccaggaacctcgcccctgatacggtatgccgcttggaccggcgggctcgccgccgtggtgttgttgtgtttagttatctttttgatttgtactgccaagcggatgcgagtcaaggcatatcgggtggataagtcgccctacaatcagtctatgtattatgccggactgcctgtggacgattttgaggactcagagtctaccgatacggaggaggagttcgggaacgccataggagggtcccatgggggctccagttataccgtgtatatagataagactagg

SEQ ID NO: 251 - RNA, 1869 nt, synthetic construct
  source 1..1869: mol_type = other RNA
atgggcactgtcaacaagcctgtggtgggggtcctgatggggttcgggatcatcacagggacattgaggattactaaccctgttcgggcctctgtgctgcgctatgatgacttccatatcgatgaggataaactggataccaacagcgtgtatgagccatattaccatagcgaccatgccgaatcatcctgggtgaatcgcggggagtcatctcgtaaggcttatgatcataatagtccgtacatctggcccagaaacgattatgatggctttcttgagaatgcccacgagcatcacggtgtttacaaccagggccgcggaattgacagtggtgagaggttgatgcagcctactcagatgtccgctcaggaggatctgggcgacgacactgggattcatgtgattccgactttgaacggtgatgaccggcataaaatcgtgaatgtggatcagaggcagtacggcgatgtgtttaagggcgatcttaatccaaagcctcagggacagaggttgattgaggtgtccgtggaggagaaccatccctttacgctgcgtgctcccatacagagaatctatggggttcggtataccgaaacttggagctttctccctagtctgacatgtacgggcgacgctgctcccgctatccagcacatatgtctgaagcacacaacgtgcttccaggacgtggtggtggatgttgactgtgccgagaataccaaggaggaccaacttgcagagatcagctacaggtttcagggcaagaaagaggcagaccagccgtggattgtcgtcaacacatctacgctgtttgacgaactggagctcgatcctcctgagattgagcccggcgtcctgaaagtgctgcgtactgaaaagcagtacctcggagtttatatttggaacatgaggggtagtgatggtaccagcacgtacgctacgtttctggtgacatggaaaggcgacgagaagacacgaaaccccacccctgctgtgactccacagccaaggggggccgagtttcacatgtggaattatcattctcacgtgtttagtgtgggcgatacattttctctcgctatgcacctccagtataagatccatgaagcacctttcgatctactactggagtggctctacgtgcccatagatccaacctgtcagcccatgagattgtacagtacgtgtctgtaccatcccaacgctccccaatgtctgagtcatatgaactctggttgtactttcacgtctccccatctcgcccagcgggttgcctccacggtgtaccagaactgcgagcatgcagacaactacactgcctattgcctcgggatctcccatatggagcctagtttcgggctcatcctccatgatggcggcaccactctcaaattcgtggatactcctgagagcctgagcggcctgtacgtgttcgtagtctactttaacggccatgtggaggctgtggcctacactgttgtaagtactgtcgaccatttcgttaacgcaatcgaggaaaggggctttccgccgactgccggacagccccccgccacaacaaagcctaaggagatcacccctgtgaaccccggtacttccccactgattcggtatgctgcttggactggcggtctggccgcagtcgtgctgttgtgtttagtaatttttctgatttgtacagccaaaaggatgcgagtgaaagcttatcgagtggacaagtcgccttacaaccagtcaatgtactatgccggactccctgttgatgattttgaggactcagaatctaccgacaccgaggaggagtttgggaacgcgataggaggctctcacggggggtcatcctacactgtgtacatagataagactcgg

SEQ ID NO: 252 - RNA, 1869 nt, synthetic construct
  source 1..1869: mol_type = other RNA
atggggactgtcaacaaacccgtggtcggagtgctgatggggttcggtattatcacggggactctccggataactaaccctgttcgcgcctccgtgctgcgttatgatgacttccacatcgatgaggacaaactagacaccaactctgtgtatgagccatactaccacagcgaccatgctgagtcatcttgggtcaataggggagagtcttccagaaaggcttatgatcataacagtccatatatctggccccggaatgattatgatggctttctggagaacgcccacgagcatcacggtgtttacaaccagggccgcggaattgacagtggtgagagattgatgcagcctactcaaatgtccgcccaggaggatctgggcgatgacacggggatccatgtgattccgaccctgaatggtgacgaccgccataagatcgtgaatgtggatcagaggcaatacggcgacgtgttcaagggcgaccttaatccgaagcctcagggccagaggttgattgaggtgtctgtggaggagaaccatcctttcactctgcgtgctcccatccagagaatctatggagttcggtataccgaaacttggtcttttctgcctagtctgacctgtaccggggatgccgcccccgccatccagcacatatgcctgaagcacaccacgtgctttcaggacgtggtggtggatgtagattgtgcagagaataccaaggaggatcagctcgctgagatctcttataggtttcagggtaagaaggaggctgatcagccttggatcgtcgtcaacacgtccactctgtttgacgagctggagctggatcctcccgagatcgagcctggcgtgctgaaggtgcttcgtactgagaaacagtatctcggagtctatatctggaacatgagggggtcggacggtacaagcacgtacgctacatttctggtgacatggaagggcgacgagaagactagaaacccgactcccgctgtgactccacagcccaggggtgccgagtttcacatgtggaattatcattctcacgtgtttagtgtgggagatacatttagtctcgctatgcacctccagtacaagattcacgaagcccccttcgatctgctactggagtggctctacgtgcccattgatccaacttgtcagccgatgagactgtacagtacgtgcctgtatcacccaaacgctccccagtgtctaagccatatgaactctggatgcaccttcacatccccccatcttgcccagcgggttgcttctacggtgtatcagaactgtgagcacgccgacaattacaccgcctattgcctaggcatcagccacatggaaccctcgttcggactgatcctccatgatggtggaactactctcaaattcgtggacacgcctgagagcctgagcggcctgtacgtgtttgttgtgtactttaacggacatgtggaggccgtagcttacaccgttgtgagcaccgtcgatcatttcgtgaacgcgatcgaggagagaggatttcccccgaccgctggacagccccctgccaccacaaagcctaaggagatcacacccgtgaatccaggcacatccccattgattcggtatgctgcatggaccggcggtctggccgccgtggtgctgctttgtctggtaattttcctgatttgtactgctaagcgcatgcgagttaaggcataccgggttgacaagtccccatacaatcagtctatgtactatgccgggcttcctgtcgacgattttgaggactcagaatcgaccgacacagaggaggagttcgggaacgcgataggtgggtcccacgggggctcctcctacaccgtgtacatagataagactcga

SEQ ID NO: 253 - RNA, 1869 nt, synthetic construct
  source 1..1869: mol_type = other RNA
atgggcaccgtcaacaagcccgtggtgggagtcctgatgggattcggtattatcactggcaccctcaggatcaccaatcccgtcagggcttctgtcctacgctatgacgatttccacatcgatgaagacaagctggacactaatagcgtgtatgaaccatactaccacagcgaccatgcggagtcatcatgggtcaaccggggcgagtcttctaggaaagcctacgatcataatagtccatacatctggccacggaatgactatgatggttttttggaaaacgctcatgagcatcacggcgtttacaaccaggggcggggaattgacagtggtgagaggttgatgcagcctactcagatgtccgctcaggaggatctgggcgacgacactggcattcatgtgattccgaccttgaacggcgacgaccgccacaagatcgtgaatgtggaccaacggcaatatggtgatgtgtttaaaggggatctgaatccaaagcctcaaggacagaggctgattgaggtctctgtggaggagaaccatcctttcactctgcgcgctccaattcagaggatctacggagttcggtataccgaaacttggtcgttcctgcccagtctcacatgcaccggggatgctgctccagcgatccagcacatttgcctcaagcatacaacttgcttccaggatgtggttgtggatgtggactgtgcagagaacaccaaagaggaccagctggctgagatctcttacagatttcagggcaagaaggaggctgaccagccatggatcgtggttaacacctctaccctgttcgatgaactggagcttgatcctcccgaaatcgaaccaggggtgctgaaagtgctgcgaacagaaaagcagtatctcggggtatacatatggaacatgaggggtagcgatgggaccagcacgtatgcaacgttcctggtgacttggaagggcgacgaaaagacacggaaccccacgcctgctgtgaccccacagcctagaggcgcggagttccacatgtggaattaccattctcatgtctttagcgtaggggacacattctcactggctatgcacttacagtataagatccatgaagccccattcgatctcctgctggagtggctttacgtgcccattgacccaacttgccagcccatgcgtctgtatagcacctgcttgtaccaccccaatgcaccccaatgtttgtcccatatgaactctggatgcaccttcacttcaccacaccttgcccagcgggtcgcctctaccgtgtaccagaactgcgagcatgcagataattacaccgcctattgcctaggcatctcccatatggaacctagtttcggcctgatcctgcatgacggcggaaccactcttaagttcgtcgatacccctgaaagcctgagcggcctctatgtgtttgttgtgtattttaacggacatgtggaggccgtggcttacaccgttgtgagcaccgttgatcacttcgtgaacgcgatcgaagaacgtggttttcctcctacggctggtcagcccccagctaccaccaagcccaaggagattacccccgtgaaccctgggacgtcccccctgatccggtatgctgcctggaccgggggcttggccgcagtggtgctgttgtgtctggttatcttcctgatttgcaccgctaagcgcatgcgagtcaaggcctatcgggttgataagagtccttacaaccagtcaatgtactatgccggactccctgtggatgattttgaagattcagagtcaacggacacagaggaggaattcggcaatgcaataggagggtctcatggaggctcctcttataccgtgtacattgacaagactagg

SEQ ID NO: 254 - RNA, 1869 nt, synthetic construct
  source 1..1869: mol_type = other RNA
atgggcactgtcaataagccagtcgtgggtgtgctcatggggttcggtattatcacgggaacactgcgcataacaaaccctgttagggcatctgtgctgcgctatgacgacttccacatcgacgaggataaactagataccaacagcgtgtatgaaccatattaccatagcgaccatgctgagtcaagttgggtgaataggggtgagtcttcccgcaaggcttatgatcataatagtccatacatctggccccggaatgactatgatggctttcttgagaatgctcacgagcatcacggtgtttacaatcaaggccgcgggattgacagtggcgagcgtctgatgcagccaactcagatgtccgctcaggaggatctgggcgacgacactgggattcatgttatcccgacattaaacggtgatgaccggcataagatcgtgaacgtggatcagaggcagtacggcgatgtgtttaagggcgaccttaatcctaagcctcagggacagaggctgattgaggtgtctgtggaggaaaaccatcctttcactctgcgtgctcccattcagagaatatatggtgttcggtatactgaaacttggtcttttctgcctagtctgacatgcactggagacgccgctccggccattcagcacatatgcctgaagcataccacctgcttccaggatgtggtggttgatgtcgactgtgcagagaataccaaggaggatcaactcgccgagatctcctacaggtttcagggcaagaaggaggcagaccagccgtggattgtcgtcaacacaagtaccttgtttgacgagctggagctcgatcctcctgagattgagcccggcgtgttgaaagtgcttcgtacagagaagcagtatctcggagtgtatatctggaacatgaggggttccgatggtacttctacgtacgccacatttctggtgacatggaagggcgacgagaaaactcgaaatcccacacctgctgtgactccacagcctaggggggctgagtttcatatgtggaattaccattctcatgtgtttagtgtgggagataccttttccctcgctatgcacctccagtacaagattcacgaggcccccttcgatcttctactggagtggctctacgtgcccattgatccaacttgtcagcccatgagactgtacagtacgtgcctgtatcatccgaacgcccctcaatgtttatcacatatgaattctggatgcactttcacttctccccatctcgcccagcgggttgcatccacggtgtatcagaactgcgagcatgcagataattacaccgcctattgcctggggatctcgcacatggaacccagtttcggcctgatcctccatgatggcggaactacactcaagttcgtggacactcctgagagcctgtcgggcctatacgtgtttgttgtctactttaacgggcatgtagaggccgtggcctatactgtcgtgagcaccgtagatcattttgtgaatgcgatcgaggaaagaggctttcccccgaccgcaggccagccccctgccacaaccaagcctaaggagattactcctgtgaaccccggtacatcaccactgattcggtatgctgcctggaccggaggtctggccgccgtggtgctgttatgtttagtgatctttttgatttgcaccgcaaagcggatgcgagtgaaagcgtatcgggtggataagtcgccctacaaccagtctatgtactatgccggactccctgtggatgattttgaggattcagaatccaccgacacagaggaggagtttgggaacgcgatcggagggtcccacgggggctcctcctataccgtgtacatagataagactcgg

SEQ ID NO: 255 - RNA, 1869 nt, synthetic construct
  source 1..1869: mol_type = other RNA
atgggcacagtgaacaagccagtggtaggcgtgctgatgggcttcggcatcatcactggaaccttgcggatcacaaaccccgtgagggccagcgtcctgcgttacgatgacttccacatcgacgaggacaagctggacactaacagtgtatacgagccatattaccactccgatcatgcagagagttcctgggtgaatcgcggggagagcagccggaaggcttatgaccacaactctccctacatctggccccggaacgactatgatggcttcctggagaacgcccacgagcaccacggggtgtataaccaggggcgtggcatagattccggggagaggctgatgcagcctacccagatgtccgcccaggaagatctcggggatgatactggaatccacgtgattccaaccctgaacggggacgaccggcacaagatcgtcaacgtggatcagcgccaatatggcgacgtttttaagggggacctgaaccccaagcctcagggccagagactcattgaggtgtcagtggaggaaaaccaccccttcaccctccgcgcacctatccagcgtatttatggggtgcgttacaccgagacttggagctttctgccaagtctcacctgcacaggcgacgccgccccagctatacagcatatttgtctgaagcatacaacatgcttccaagacgtggtggtggacgtcgactgtgcagaaaacaccaaggaggatcagcttgctgaaatctcttaccgatttcagggtaagaaggaggctgatcagccttggattgtggtgaacacgagcaccctatttgatgagctggagctggaccctcccgagatcgagcccggggtgctgaaagttctccgcacggagaagcagtacctcggggtctatatctggaatatgagaggctctgacgggacctctacatacgctacgtttctcgtcacctggaaaggtgacgagaagactcggaaccccaccccagctgtgactccacagcccaggggtgcggagttccacatgtggaattaccattcacacgtgttctctgtgggggacacattcagccttgccatgcatctgcagtataaaattcacgaggccccctttgacctgctgctggagtggctgtatgtgcccatagacccgacctgtcagcccatgagactgtactcaacatgcctctaccatccaaacgcaccacagtgcctgagccacatgaattcgggctgcacttttaccagccctcacctggctcagagggtggcctcaacagtgtaccagaactgcgagcacgcagataattacactgcgtattgtttgggtatcagtcatatggagcccagtttcgggctcattctgcatgacggaggcactaccctcaagttcgtggatactcccgagagcttgagcggcctctacgtgttcgttgtttacttcaacggacacgtggaggccgtggcgtacaccgtagtgtccacagtggatcacttcgtgaacgccattgaggagcggggcttcccgcccaccgccggccagcctccggcaaccacgaagccgaaggagataactcccgttaatcccgggacgtcccctttgataaggtatgcagcgtggaccggaggtctggccgcggtggtgctcctctgtctggtgattttcttgatttgcaccgccaagcggatgcgagtcaaggcatacagggtggacaagtcaccctacaatcagagtatgtactacgccgggctccctgtggatgactttgaggactccgaatcaaccgacactgaggaggagttcggcaacgccatcggagggagccacggcggctcgtcatacactgtgtacatcgacaaaactcgg

SEQ ID NO: 256 - RNA, 1869 nt, synthetic construct
  source 1..1869: mol_type = other RNA
atgggtaccgtgaataagcccgtggtaggcgtgctcatgggctttggtataattaccggcacactgcggattacaaatcctgtgcgtgccagcgtcctgagatacgatgacttccacatcgacgaggacaagctggatacaaacagcgtctatgagccatattaccacagcgatcatgccgaatcctcctgggtgaataggggggagtcaagccgcaaggcgtacgaccataactccccctacatctggccccggaatgactatgacgggttcctggagaacgcccatgagcaccatggagtgtacaaccagggacgcggcatagattctggggagaggctgatgcagcctacacagatgtccgcccaggaggatttgggagatgataccgggattcacgtgatccccactttaaacggggacgatcgccacaagatcgtcaacgtggatcaaagacaatacggtgacgtcttcaagggggacttgaatcccaagcctcagggccagcggctgatcgaggtaagcgtggaggagaaccatcccttcaccttgcgggctcccatccagcggatctacggggtacgatacaccgagacttggagttttctgccaagtctcacatgcacaggcgacgccgcccccgccatccagcatatttgcttgaagcatacaacatgtttccaggatgtggtggtggacgtcgactgtgcagaaaataccaaggaagatcagctggctgagatttcttaccgcttccagggtaagaaagaggccgatcagccttggatcgttgtcaacacgagtaccctgtttgacgagctggaacttgatccgccagagatagagcccggggtcttgaaggttctccgcacggaaaaacagtacctgggagtgtacatctggaacatgaggggttccgacgggacctcgacctatgccaccttcctggtgacctggaagggggacgagaagacgcggaaccccaccccggctgtcaccccgcagccccggggagcggagtttcacatgtggaactaccactcccacgtgttttccgtgggggataccttctctcttgctatgcatttgcagtacaagatacacgaggcccccttcgatctgctgctggagtggctgtatgtgcccattgatcctacttgtcagccgatgcggctgtatagcacctgcctttaccaccccaacgccccacagtgtctgagccatatgaactcgggctgtacttttactagcccgcacttggctcagagggtggccagtacagtgtaccaaaactgtgaacacgctgacaactacaccgcgtattgtctgggcatcagccacatggagcccagttttgggctcattcttcacgatgggggcaccaccctcaaatttgtggatacccctgagagcttgagcggcctgtatgtgttcgttgtgtacttcaacggacacgtggaggccgtggcgtacacagtggtcagcacagttgaccacttcgtgaacgccattgaggagcgtgggttcccgcccaccgccggccagcctcctgcgaccacgaagccgaaggagatcacccctgtgaacccagggacgtctccactgattcgctatgctgcgtggacaggaggcctggccgcggtggtgctcctctgccttgtgatttttttgatttgcaccgcaaagcggatgcgagtcaaagcttatagggtggataagtccccctacaatcaatccatgtattacgccgggctgcccgtcgatgactttgaggattccgagtccacagacactgaggaggagttcggcaacgccatcggcggcagccacggtgggtcatcttatactgtttacattgacaaaacaaga

SEQ ID NO: 257 - RNA, 1869 nt, synthetic construct
  source 1..1869: mol_type = other RNA
atgggcaccgtgaataagccagtggtaggagtgttgatgggcttcggcattatcactggcaccttgcgcatcacaaaccctgtgcgagccagcgtcctgcgttacgatgacttccacatcgacgaggacaagctggatacgaatagcgtgtatgagccatattaccactccgatcatgcagagtcctcctgggtgaacaggggggagtctagccggaaggcttacgaccacaattccccctacatctggccccggaacgattatgacgggttcctggagaacgcccatgagcatcatggagtgtataaccagggacgcggcatcgattccggggagcggctcatgcagcctacccagatgtccgcccaggaggacctcggggatgataccgggatccacgtgattccaaccctgaatggggacgatcggcacaagatcgtcaacgtggatcaacgccaatatggcgatgttttcaaaggggatcttaaccctaagccccagggccagcggctaatcgaggtgagtgtggaggagaaccatccattcaccttgagagccccgatccagcgtatctatggggtgcgttatactgagacttggtcattcctgccgagtcttacctgcaccggtgatgccgccccagctatacaacacatatgtctcaagcataccacatgctttcaggacgtggtggttgatgttgactgtgcagagaacaccaaggaggatcagcttgcagagatttcttaccgctttcagggtaagaaggaggctgatcagccttggatcgtggtgaacacgagcaccctgtttgatgagctggagctggaccctccggagattgaacccggggtgttgaaggtgctgcgcaccgagaaacaatacctcggggtgtatatctggaatatgagggggtccgacgggacctccacatatgccacttttctcgtcacctggaaaggtgacgagaagacccggaaccctacccccgctgtgaccccacagccgcggggtgcggagtttcacatgtggaactatcatagccacgtgttctcggtgggcgataccttcagcctggcaatgcacctgcagtacaagatacacgaggccccctttgatctcctgttggagtggctgtatgtgcccatcgaccccacatgccagcctatgcggttgtactccacctgcctgtaccatcctaacgcaccacagtgcttgagccatatgaattcgggctgcactttcaccagccctcatctggcccagagggtggcctcaacagtgtaccaaaactgtgaacacgctgacaattacactgcgtattgcctgggtattagccatatggagcctagttttgggctcattctgcatgacggtggcacaaccctcaagttcgtggacacccccgagagcttgagcggcctctacgtgttcgttgtgtacttcaatggacacgtggaggccgtggcgtataccgtagtgtcaactgtagaccacttcgttaacgccatagaggagcgcggcttcccgcccaccgccggccagcctcctgccaccacaaagccgaaggagatcaccccagttaatcctgggacgtctcccctcattcggtacgccgcgtggacaggaggcttggccgcggtggtgctcctctgtctggttatatttttgatctgcaccgccaagcggatgcgggtcaaggcatacagggtggacaagtcaccctacaaccagtccatgtactacgccgggctccctgttgatgactttgaggactccgaatctaccgacactgaggaggagttcgggaatgccatcggcgggagccacggcggcagtagttatactgtctacatcgataagacacgg

SEQ ID NO: 258 - RNA, 1869 nt, synthetic construct
  source 1..1869: mol_type = other RNA
atggggacggtgaataagccggtggtaggcgtgctcatgggcttcggtatcattaccgggaccctgcgcatcactaatcctgtgcgggccagcgtgctgcgttacgatgacttccacatcgacgaggataagctggacacaaatagcgtctatgagccgtactaccacagtgatcatgccgaatcctcctgggtgaataggggagagtcatctcgtaaggcgtacgaccataactctccctacatctggccccggaatgactatgacgggttcctggagaacgcccatgagcaccatggagtgtataaccaggggcgcggcatagattccggggagaggctgatgcagcctacacaaatgtcagcccaggaggatttgggagatgacactgggattcacgtgatccctaccctcaatggcgacgatcggcataagatcgtcaacgtcgaccagcgccaatatggcgacgtttttaagggggacttgaaccccaagcctcaggggcagcgcctgattgaggtgagcgtggaggagaaccatcctttcacgctgcgggcccccatccagcggatctacggggtacggtacactgagacttggagttttctgccaagtctcacctgcacaggcgacgccgcacctgccattcagcacatatgcctgaagcacaccacgtgctttcaggatgtggtggtggacgtcgattgtgcagagaataccaaggaggatcagctcgccgagatttcttaccgcttccagggtaagaaagaggctgatcaaccttggatcgtggtcaacacgagtaccctgtttgacgagttggagcttgatccacccgagatcgagccgggggtgttgaaggtgctccgcacggagaagcagtacttgggcgtgtacatctggaacatgagggggtccgacgggacctctacttatgcaacttttctcgtcacctggaagggtgacgagaaaacgcggaatcccacgcccgcggtgaccccccaaccccggggggcggagttccacatgtggaactaccactcacatgtgttctcggtgggggataccttttctctggccatgcacctccagtacaagatccacgaggcaccctttgatctgctgctggagtggctgtacgtccccattgaccccacttgtcagcctatgaggctgtacagtacatgtctgtatcaccccaacgccccccagtgcctgagccacatgaactcgggctgtacatttacaagcccgcacctggcccagagggtggcctcgacagtgtaccaaaactgcgagcacgcagacaactacactgcgtactgccttgggatctcccacatggagcccagtttcgggctcattcttcacgatggaggaaccaccctcaaattcgtggacacccctgagagcttgtccggtctctacgtgttcgttgtgtacttcaacggacacgtggaggccgtggcgtacacagtggtctctacagtggaccattttgtgaacgccatagaggagcgtggttttccacccaccgccggccagcctcctgccaccacgaagccgaaggagatcacccctgtgaatccaggcacatctcctctgatccgctacgctgcgtggacaggaggcttggccgcggtggtgctcctctgcctagtgatctttcttatctgtaccgcaaagcggatgcgggtgaaagcttacagggtagacaagtccccctacaatcagtccatgtattacgccgggctgccagtcgatgacttcgaggattctgaaagcacagacaccgaggaggagttcggcaatgcgattgggggtagccacgggggttccagttatactgtctacatagacaagaccaga

SEQ ID NO: 259 - RNA, 1869 nt, synthetic construct
  source 1..1869: mol_type = other RNA
atgggcaccgtgaacaagcccgtggtcggcgtgctcatgggcttcggtatcattaccggcacgctgaggatcactaaccctgtgcgtgccagcgtcctgcgatatgatgactttcatatcgacgaggacaagctggatacaaacagcgtctatgagccatattaccattccgatcatgccgaatcttcctgggtgaatcggggggagtcaagccgcaaggcatacgaccacaactccccctacatttggccccggaatgactacgacgggttcctggagaatgcccatgaacatcatggggtgtacaaccaggggcgcggcatcgattccggggagaggctgatgcagcctacacaaatgtccgcccaggaggatttgggcgatgataccgggatccacgtgatccccaccctgaatggggacgatcgacacaagatcgtcaacgtggatcagcgccaatacggcgacgtattcaagggggatttgaatcccaaaccgcagggtcagcggctgatcgaggttagcgttgaggagaaccatccttttaccctgcgggcgcccatccagcggatttacggggtgcgatatactgagacttggagtttcctcccaagtctcacctgcacaggcgacgccgccccagccatccagcatatctgcctgaagcatacaacttgcttccaggatgtggtggtggacgtcgactgtgcagaaaacaccaaggaggatcagctcgctgagatctcttaccgcttccaaggtaagaaggaggctgatcagccttggatcgtggtcaacaccagcaccctgtttgatgagctggagctcgatcctcccgagatcgagcccggggtgttgaaggtgctccgcaccgagaaacagtatctgggcgtctatatatggaatatgagggggtccgacgggacgtctacctacgcaacatttctcgtcacctggaagggagatgagaaaacgcgtaatccgactcccgctgtgaccccacagcccagaggggctgagtttcacatgtggaactaccattcacatgttttctcggtgggggacaccttctctctggcaatgcacctccagtacaagatccacgaggccccctttgatctgctgctggaatggctgtacgtgccgatcgacccgacatgtcagccgatgaggctgtactctacatgtctttaccatccaaatgctccccagtgtctgagccacatgaactcgggctgtactttcacaagcccgcatctggctcagagggtggcgagcacagtctaccaaaactgcgaacacgcagataattacacagcgtactgcctcggcatcagccatatggagcccagtttcgggctcattctccacgatggagggaccaccctcaagttcgtggacactccagagagtctctcaggtctctacgtgttcgttgtgtactttaatggacacgtggaggccgtggcgtatacagtggtctctacggtggaccacttcgtgaacgccattgaggagcgggggttcccacctacagccggccagcctccggccaccacgaagccgaaggagattacccctgtgaatccagggacgtctccactgatccgctacgcggcttggaccggaggcttggccgctgttgtgctcctctgccttgtgatctttttgatttgcaccgcgaagcggatgcgggtcaaagcttacagggtggacaagtccccctacaaccagtcgatgtactacgccgggctgccagtcgatgactttgaggactccgagtccacagacactgaggaggagttcggcaacgcgatcggcggtagccacggcgggtctagctatacagtgtacatcgacaagaccaga

SEQ ID NO: 260 - RNA, 1869 nt, synthetic construct
  source 1..1869: mol_type = other RNA
atgggcaccgtcaacaaaccagtggtaggagtgctgatgggattcggcattatcactgggaccctgcgcatcacaaacccggtgcgcgcctctgttctgaggtacgatgacttccacatcgacgaggacaagctcgacactaattctgtgtatgagccatactatcactctgatcatgcagaatcctcctgggtgaataggggggagtctagccggaaggcatatgaccacaattccccctacatctggccccggaacgactacgacgggttcctggagaacgcccatgagcatcatggcgtgtacaaccaggggcgcggcatcgattccggggaacggctgatgcagcctacccagatgtccgcccaggaggacctcggggacgataccggaatccacgttatccccacactgaatggggacgatcgccacaagatcgttaacgtggatcagcgccaatatggcgacgtatttaagggggatctgaaccccaaacctcagggccagcggctaattgaggtgagtgtggaggagaatcaccccttcaccttgagggctcccatccagcgtatctatggggtgcgttacaccgagacttggtcctttctgccaagtctcacctgcacaggcgatgccgcccccgccatccagcatatttgtctgaagcataccacatgcttccaagacgtggtggtggacgtcgactgtgcagaaaacaccaaggaggatcagcttgccgagatttcttaccgcttccagggtaagaaggaagcagatcaaccttggatcgtggtaaacacgagcaccctttttgatgagctggagctggatcctcccgaaatcgaacctggggtgctgaaggtgctccgcactgagaagcaatacctgggggtgtacatctggaatatgagaggttccgatgggacctctacatacgccacttttctcgtcacctggaaaggtgacgagaagacgaggaaccccacccctgctgttactccacagccaaggggtgcggagttccacatgtggaactaccacagtcatgttttctcggtgggggacaccttcagcctggcgatgcacctgcaatacaaaatccatgaggccccctttgatctcctgctggagtggctttatgtacccatagacccgacatgccagcccatgagattgtacagcacttgtctgtatcatccaaacgcacctcagtgcctgagccacatgaattcgggctgcacctttaccagcccgcatctggctcagagggttgcctcaacggtgtatcagaactgtgagcacgcagataattacaccgcgtattgcttgggcatcagccacatggagccgtcattcgggctcattctgcatgacggggggactaccctcaagtttgtggacaccccagaaagcttgagcggcctctacgtgttcgttgtttacttcaacggacatgtggaggctgtggcgtacaccgtagtgtccacggtggaccacttcgtgaacgccattgaggagcgcgggttcccgcccaccgccggccagcctcctgccaccaccaagccgaaagaaatcaccccagtgaatcctgggacgagcccactgattcggtacgctgcgtggacaggaggcctggctgcggtggtgctcctctgtctggtaatatttttgatctgcaccgccaagcggatgcgggtcaaagcatatagggtggacaagagtccctacaaccagtcgatgtattacgccgggctccctgtcgatgactttgaagactccgagtctaccgacacggaggaggagttcggcaacgccatcggcggaagtcatggtggcagttcttacactgtatacatcgacaagacacgg

SEQ ID NO: 261 - RNA, 1869 nt, synthetic construct
  source 1..1869: mol_type = other RNA
atgggtacggttaataagccggtggtcggggtgctgatggggttcgggatcatcaccgggacgctgcgcattacaaatccagtgcgcgcgtccgtcctgcgttacgatgactttcacatcgacgaggacaagctggatacaaacagcgtgtacgagccatattaccactctgatcacgccgagtcctcctgggtgaataggggggaatcgagtcgcaaagcgtacgaccacaattctccctatatctggccccggaacgactatgacgggttcctggagaacgcccatgagcatcatggagtgtataaccaggggcgcggcatagattcgggggagaggctgatgcagccgacccagatgtctgcccaggaggacctgggcgacgacactggcatccacgtgatcccgaccctcaacggggacgatcgtcacaagatcgtcaacgtggaccagcggcagtacggtgacgtgttcaagggggacctcaacccgaagccccaggggcagcggcttattgaggtgtcagtggaggaaaatcatccattcaccctccgagccccaattcagcggatctatggggttcggtacacggagacgtggagttttctgccaagtctgacctgcacgggcgatgccgcccctgcaatccagcatatttgcttgaaacacactacatgctttcaggatgtggtggttgatgtcgactgtgcagagaacactaaggaggatcagcttgccgagatttcttaccgcttccagggcaagaaggaggctgatcagccttggatcgtggtgaacacgtccaccctgtttgatgagctcgagcttgatcctcccgagatcgagcccggggtgctgaaggtgctccgcaccgagaagcagtacctgggggtgtacatctggaacatgcgggggtcggacgggacttctacgtacgcgaccttccttgtgacctggaagggcgacgagaagacccgtaatccgacccccgcagtgacaccccagcctcggggggcggaatttcatatgtggaactatcactcccacgtgttctcggtgggggacaccttcagtcttgcaatgcacctccagtataagatccacgaggctccctttgatctcttgctggagtggctgtatgtgcctattgaccccacatgccagccaatgagactgtattctacgtgtctctatcatcccaacgctcctcaatgcctgtcccatatgaacagtgggtgtacctttacatccccccacctggcccagcgtgttgctagcacggtgtaccagaattgtgaacacgccgataactatacggcgtattgcctgggcattagccacatggagccctccttcggcctgattctgcacgacggaggcacgacgctcaagttcgtggatacccctgagagcttgagcggcctctacgtgttcgtggtgtattttaacggacacgtggaggccgtggcgtacacagtggtcagcacggtcgaccactttgtgaacgccattgaggagcgtgggtttccacccaccgcaggccagccccctgccaccacgaagccaaaggagattaccccagtaaaccctgggactagtcccttgatccgctacgctgcgtggacaggcgggctggccgcggtggtgctgctgtgtctggtcatttttcttatctgcacggctaagcgcatgcgggtgaaggcttaccgggttgacaagtccccctataatcagagcatgtactacgccggtctgccggtcgatgactttgaagatagtgagtccactgacactgaggaggagttcggcaatgccatcggcgggtcacacggcggctcctcgtatactgtctatatcgacaagacccgc

SEQ ID NO: 262 - RNA, 1869 nt, synthetic construct
  source 1..1869: mol_type = other RNA
atggggaccgtgaataagccggtggtaggggtgctcatggggttcggtatcattaccggtactctgcgcattactaaccctgtgcgtgctagtgtcctccggtacgatgacttccacatcgacgaggacaagctggacactaacagcgtatatgagccctactaccactccgatcacgccgagtcctcctgggtgaataggggggagtcatcccgcaaggcctatgaccataactctccctatatctggccccggaatgactatgacggattcctggagaacgcccatgagcatcatggggtgtataaccaggggcgcggaatagactccggggagaggctgatgcagcctacccagatgtccgcccaggaggatcttggcgatgataccggcattcacgtcatccccaccctcaatggcgacgatcgtcacaagatcgtcaatgtggaccagcgccaatatggcgatgttttcaagggggacctcaatcccaagccccaaggacagcggctgattgaggtcagcgtggaggaaaaccatcccttcacccttcgggctcccatccagcggatctacggtgtacgatatactgagacttggtcattcctgccaagtctcacatgcacaggcgacgccgccccagccatccagcacatatgcctgaagcacaccacgtgcttccaggatgtggtggtggacgtggactgtgcagaaaacaccaaggaggatcagctcgccgagatttcttaccgctttcaaggtaagaaggaagctgatcagccttggatcgtggtcaacacgagtacactgtttgacgagctggagctggacccccccgaaatcgagccaggggtgctgaaggtactccgcaccgagaaacagtacctgggagtctacatttggaacatgagggggagcgacgggacgtcgacttacgcaacatttctcgtgacctggaagggtgacgagaagacgcggaatccgactcccgcggtcacccctcagcctcgtggcgcagagttccatatgtggaactaccactcgcatgtgttctcggtgggggataccttcagtctcgctatgcacctccagtacaagatccacgaggcacccttcgatctgctgctggagtggctgtacgtgccgatagacccgacatgtcagcctatgaggctgtattctacatgcctctaccacccaaatgccccacagtgtctgagccacatgaactcgggctgtacttttaccagcccgcatctggctcagagggtggctagcacagtttaccagaactgtgagcacgcagataattacactgcgtactgccttggcatcagccatatggagcccagtttcgggctcatactccacgatggagggaccaccctcaagttcgtggatacacctgagagcttgtccggcctctacgtgttcgttgtatacttcaacggacacgtggaggccgtggcgtacacagtggtctctacagtggaccacttcgtgaacgccattgaagaaagggggttcccccccaccgccggccagcctcctgccaccacgaagcctaaggagatcacccctgtgaacccagggacgtctccacttatccgctacgctgcgtggacaggaggtctggcggcggtggtattgctctgcctcgtgatctttttgatttgcaccgccaagcggatgcgggtcaaggcttatagagtggacaagtctccctacaatcaatccatgtactacgctgggctgccagtggatgactttgaggactccgaatccacagatacggaggaggagttcggcaatgcgatcggcggcagccacggaggttcctcctatactgtctacattgacaagacccgc

SEQ ID NO: 263 - RNA, 1869 nt, synthetic construct
  source 1..1869: mol_type = other RNA
atggggaccgtgaataagcccgtggtaggcgtgctcatgggcttcggtatcatcacaggtactctgcgcattacaaaccctgtacgcgcaagtgtcctacgctacgatgattttcacatcgatgaggacaagttggacaccaactcagtctatgagccgtattaccactccgatcacgccgagtcttcctgggtgaacaggggggagtctagtaggaaggcctacgatcacaactccccctacatctggccccggaatgactacgacgggttcctggagaacgcacatgagcatcatggcgtgtataaccaggggcgcggtattgattccggggagaggctgatgcagcccacgcagatgtctgcccaggaggacctcggcgatgatacgggcattcatgttatccccaccctaaatggcgatgaccgccacaagatcgtgaacgtggatcagcgccaatatggggacgtttttaagggggacttgaaccccaagcctcagggccagcggctgatcgaggtcagtgtggaggaaaaccaccccttcaccctgagggcgcccatccagcgaatttacggggtacgatatactgagacttggagctttctaccctcgctcacctgcacaggcgacgccgcccccgccattcagcatatatgcctgaagcatacaacatgcttccaggatgtggtggtggacgtcgactgtgcagaaaacaccaaggaggatcagctcgccgaaatttcttaccgtttccagggtaagaaggaggctgatcaaccttggatcgtggtaaacacgagtaccctgtttgacgagctggagctcgatcctccagagatcgagcctggggtgttgaaggttctccgcaccgagaagcagtacctgggagtgtatatttggaacatgagggggtcggacgggacctctacttatgccaccttcctcgtcacctggaagggtgacgagaagacccggaacccgaccccagctgtaaccccacagccccggggagcagagttccatatgtggaactaccactcccatgtcttctcggtgggggataccttctctctagctatgcatctccagtacaagatccatgaggctcccttcgatcttctgctggagtggctgtatgtgcccatcgacccgacatgtcagccaatgagactgtactctacatgtctctaccatccaaacgccccacaatgtctgagccacatgaattcgggctgtacttttaccagccctcacctggctcagagggtggcctcaacagtgtatcagaactgcgagcacgcagataattacactgcctactgcctcggcatcagccatatggagccctcatttgggctcatccttcacgatggaggaaccacgctgaagttcgtggacacacctgagagcttgagcggcctctacgtgttcgttgtttacttcaacggacacgtagaggccgtggcgtacactgtggtttccacggtggaccacttcgtcaacgccatcgaggagagaggatttcctcccaccgccggccagcctcctgccacaacgaaaccgaaggagatcacacctgtcaatccaggcacgtctcctttgatccgatacgctgcgtggacaggaggcttggccgcggtggtactgctctgccttgtgatctttctgatctgcaccgccaagcggatgcgggtcaaggcttacagggtagacaagtccccctataatcagtccatgtattacgccgggctgccagtggatgactttgaggactccgaatccactgacacagaggaggagttcggcaacgctatcggcggcagccacggcggatcatcttatactgtctacatagacaagaccaga

SEQ ID NO: 264 - RNA, 1869 nt, synthetic construct
  source 1..1869: mol_type = other RNA
atggggaccgtgaataagcctgtggtgggcgtgctcatgggctttggtataatcaccgggacactgaggattaccaaccctgtgcgagccagcgtcctgaggtacgatgactttcacatcgacgaggacaagctggatactaacagcgtctatgagccgtactaccactccgaccacgccgaatcctcctgggtgaacaggggggagtcaagccgcaaggcatatgaccataactccccctacatctggccccggaatgattacgacggcttcctggagaacgcccatgagcatcatggggtctataaccagggccgcggcatcgattccggggagaggctgatgcagcctacacagatgtccgcccaggaggatttgggcgatgacaccggaattcacgtaatccccactctcaatggtgatgatcgccacaagatcgtcaacgtggaccagcgccaatatggcgacgtgtttaagggggacttgaaccccaagcctcaggggcagcggctgattgaggtgagcgtggaggagaaccatcccttcacgcttcgggcaccgatccagcgcatttatggggtacgatacactgagacctggtcttttctgccaagtctcacctgcacaggagacgccgccccagccattcagcatatatgcctgaagcacacaacctgcttccaggatgtggtggtggacgtcgactgtgcagagaacaccaaggaggatcagcttgccgagatttcttaccgcttccagggtaagaaggaggctgatcagccgtggatcgtcgtgaacacgagtaccctgtttgatgagctggagcttgatcctcctgagatcgagcccggcgtgttgaaggtactccgcaccgagaagcagtacttgggagtgtacatttggaacatgaggggttccgatgggacctctacatatgcgacttttctcgtcacctggaaaggtgacgagaaaacgcggaatcccacccccgctgtcaccccgcagccgcgcggggctgagtttcatatgtggaactatcattcccacgtcttctcggtgggagataccttctcacttgcaatgcatctccagtacaagatccacgaggccccctttgatctgctgctggagtggttgtacgtgcccattgacccaacatgtcagccgatgagactgtactctacatgtctctaccaccctaacgcccctcagtgtctgagccacatgaactcgggctgtacatttaccagcccgcatctggctcagagggtggccagcacagtgtatcagaactgcgaacacgcagacaattacactgcgtactgccttggcatcagccatatggagccctcgtttgggctcatccttcacgatggagggactaccctcaagttcgtggacacccctgagagcttgtccggtctctacgtgtttgttgtttacttcaacggacatgtggaggccgtggcgtacacagtggtatctactgtggaccacttcgtgaacgccattgaggagcgggggtttccccccaccgccggccagccccctgccaccacgaagcccaaggagattacccctgtgaatccagggacgtctccactcatccgctacgctgcgtggacagggggccttgcggcggtggtgctgctttgccttgtgatctttttgatctgcaccgccaagcggatgcgggtcaaagcttatagggtggacaagtccccctataatcagtccatgtattacgccgggctgccagtcgatgattttgaggattccgaatcgacagacaccgaggaggagtttggcaacgccatcggcggcagccacggtgggtcatcctacactgtttacattgacaagacgaga

SEQ ID NO: 265 - RNA, 1869 nt, synthetic construct
  source 1..1869: mol_type = other RNA
atgggcaccgtgaacaagccagtggtgggcgtcctgatgggcttcgggattatcactggcacgttgcgcataacgaaccctgtgcgcgctagcgtcctgcgttacgatgactttcacatcgacgaggataagctcgataccaacagtgtgtatgagccctattaccacagtgatcacgctgaatcctcctgggtgaacaggggggagtccagccggaaggcttatgaccacaattccccctacatctggccccggaatgattatgatgggttcctggagaatgcccatgaacaccatggagtgtataaccaggggcgcgggatcgattccggggaacggctgatgcagccaacccagatgtccgcccaggaagatctcggggacgataccggaatccatgtgatccctaccctgaatggggacgatcgacacaagatcgtcaacgtggatcaacgccaatatggcgatgtatttaagggggatctcaaccccaagccgcagggccagcggctcatcgaggtgagcgtggaggagaatcaccccttcaccttgagggctccgatccagcgcatctatggggtgcgttacactgagacttggtccttcttgccaagtcttacctgcacaggcgatgcagcccctgctattcagcacatttgtctcaagcataccacatgcttccaagacgtcgtggtggatgtcgactgtgcagagaacaccaaggaggatcagcttgccgagataagctaccgctttcagggcaagaaggaggctgatcagccttggatcgtggtgaacacgagcaccctgttcgatgagctggaactggacccccccgagatcgagcccggggtgctgaaggtgctccgcactgagaagcagtacctcggggtgtacatctggaatatgcgggggtccgacgggacctccacatacgccacttttctcgtcacctggaagggtgacgagaagacccggaaccctacaccggccgtgactccacagccccggggtgcagagttccacatgtggaattaccatagccacgtgttctcggtgggggacactttcagcctggcaatgcatctgcaatacaagatccacgaggccccctttgatctgctgctggagtggctgtatgtgccaatagacccaacatgtcagccaatgagactgtactctacatgtctctatcatccaaacgctcctcagtgcctgagccacatgaactcgggctgcacatttactagcccgcatctggcacaaagggtggcctcaacagtgtaccagaactgcgagcacgcagataattacactgcgtattgcttgggcattagccacatggagccctctttcgggctcatcctccatgacgggggcacaacgctcaagttcgtggacacccccgagagcttgagcggcctctacgtgttcgttgtatacttcaacggacacgtagaggccgtggcgtatacggtagtgtctacagtggatcacttcgtgaacgccattgaggagcgcggctttccgcccaccgccggccagccccctgctaccacgaagccgaaagaaataacaccggtgaatccggggacctccccactcatccggtacgccgcgtggacagggggcttggccgcggtggtgctgctctgtctggtgattttcttgatctgcaccgcaaagcggatgcgggttaaggcatatagggtggacaaaagtccctataaccagtcaatgtactacgccgggctccctgttgacgacttcgaggactccgagtccaccgacacggaggaggagttcggaaacgccatcggcgggtcacacgggggctcatcatacactgtatatatcgacaaaacacgg

SEQ ID NO: 266 - RNA, 1869 nt, synthetic construct
  source 1..1869: mol_type = other RNA
atgggcactgtgaataaaccagtggtcggagtgctgatgggcttcggcatcattactggtaccctgcgcataaccaaccctgtgcgcgccagcgtcctgcgttatgatgactttcacatcgacgaggacaagctggacaccaacagtgtctatgagccatattatcattccgatcatgcagaatcttcctgggtgaacaggggggagtctagccggaaggcatacgaccacaactccccctacatctggcccaggaacgactacgacgggttcctggagaacgcccacgaacaccacggggtgtataaccaggggcgtgggatcgattctggcgaacggctgatgcagccgacccagatgtccgcccaggaggacctcggggatgataccggcatccacgtgattccaaccctgaatggggacgatcggcataagatcgtcaacgtggatcaacgccagtatggcgacgtgtttaagggggatctgaaccctaagccacagggccagcggctcatcgaggtgtctgtggaggagaaccacccattcaccttgagagctccgatccagcgtatttatggggtgcgttatactgagacttggtctttcctgccaagtcttacctgcacaggcgatgccgccccagccattcagcatatatgtctgaagcatacgacctgcttccaagacgtggtggtggacgtcgactgtgcagagaataccaaggaggaccagcttgccgagatttcttaccggtttcagggtaagaaggaagctgatcagccttggatcgtggtaaacacgagcaccctgttcgatgagctggagctggaccctcccgagatcgaacccggggtgctgaaggttctccgcaccgagaaacaatacctgggggtgtacatttggaatatgagaggctccgatgggacctctacatacgccacctttctcgtcacctggaaaggtgacgagaagaccaggaacccgactccggctgtgactccacagcccaggggtgcggagttccacatgtggaattatcattcccatgtgttctcggtgggggataccttcagcctggctatgcacctgcagtacaaaatccacgaggcgccctttgatctcctgttggaatggctgtacgtgcctattgacccaacatgtcagcctatgagattgtacagtacatgtctgtatcatcccaacgcgcctcagtgtctgagccacatgaactcgggctgcacttttaccagcccccatctggctcagagggttgcgtcaacagtgtaccaaaactgcgaacacgcagacaactacactgcgtattgcctgggcattagccacatggagcctagtttcgggctcattctgcatgatggggggactacgctcaagttcgtggacaccccagagagcttgagcggcctctacgtgttcgttgtgtatttcaatggacacgtggaggccgtggcgtacacggtagtgtcgacagtggaccactttgtgaacgccatagaggagcgcgggtttccgcccaccgcgggtcagcctcctgcaaccacgaagccaaaggagatcacgccagtgaatccgggcacgagcccactgattcgctacgctgcttggacaggaggcttggccgcggtggtgctcctctgcctggtaatctttttgatctgcaccgccaagcggatgcgggtgaaagcttaccgggtagacaagtccccctacaaccagtcgatgtactacgccgggctccccgttgacgactttgaggactcagagtctaccgacacagaggaggagttcggcaacgccatcggggggtcccacggtggcagcagttacacggtatacatcgacaaaacacgg

SEQ ID NO: 267 - RNA, 1869 nt, synthetic construct
  source 1..1869: mol_type = other RNA
atggggaccgtgaataagcccgtggtgggtgtgctcatgggctttggtattattaccggtactctcaggattaccaatcctgtgcgtgcctcagtcctgcgttacgatgactttcacatcgacgaggacaagctggacacaaacagcgtctatgagccctactaccacagtgatcacgccgaatcctcctgggtgaatcggggggagtccagccgcaaggcttatgaccacaactccccctacatctggccccggaacgactatgacggcttcctggagaacgcccatgagcaccatggcgtgtataaccagggtcgcggtattgattccggggagaggctgatgcagcctacacagatgtccgcccaggaggatttgggtgatgacactggcattcacgtaatccccactctgaatggggacgatcgccataagattgtcaatgtggatcagcgccaatatggtgatgtgtttaagggggatttgaatcctaagcctcaggggcagcggctgattgaggtgtcagtggaggagaatcacccattcaccctccgggcacccatccagcgcatttacggggtgcgatacactgagacttggagtttccttccaagtctcacctgcacaggcgatgccgcccccgccatccagcatatatgcctgaagcacactacatgcttccaggatgtggtggtggacgttgactgtgcagaaaacacaaaggaggatcagctcgccgaaatttcttaccgcttccagggtaagaaggaggctgatcagccttggatcgtggtgaacacgagcaccctgtttgatgagctggagcttgatcctcctgagatcgagcctggggtgctgaaggtgttgcgcaccgagaagcagtacctaggggtctacatttggaatatgagggggtccgacgggacctctacatatgccacttttctggtcacctggaagggagacgagaagacccggaatccaacccccgctgtgacaccacagccacggggggctgagttccacatgtggaactaccattcacacgtgttctcggtgggcgacaccttctctcttgcaatgcatctgcagtataagatccacgaggcccccttcgacctcctgctggagtggctgtacgtgccaatagaccctacatgtcagccgatgagactgtactctacatgtctctaccaccccaacgctccacagtgtctgagccacatgaactcgggctgtacttttactagcccgcatctggcgcagagggtggccagcacggtgtaccagaactgcgagcacgcagataactataccgcttactgcttggggatcagccatatggagccctccttcgggctgatcctccacgatgggggcacaaccctcaaattcgtcgacacccctgagagcttgagcggtctgtatgtgttcgttgtatacttcaacggacacgtggaggccgttgcgtacacagtggtcagcacagtggatcacttcgtgaacgccattgaggagcgtgggtttccacccaccgctggccagcctcctgccaccaccaagccgaaggagatcacccccgtgaacccggggacgtctccactaattcggtatgctgcgtggacaggaggcttggccgcggtggtgctcctctgccttgtgatatttttgatttgtactgccaagcggatgcgggtcaaagcttacagggtggacaagtccccctacaaccagagcatgtattacgccgggctgccagtcgatgactttgaggattccgaatccacagacactgaggaggaattcggcaacgcgatcggtggtagtcacggtgggtcatcttatactgtctacattgacaagaccaga

SEQ ID NO: 268 - RNA, 1869 nt, synthetic construct
  source 1..1869: mol_type = other RNA
atgggaacagtcaataaacccgtagtaggtgtgctgatgggcttcggaatcatcactggtacattgaggatcactaatccagtccgagcttccgttctgcggtatgatgattttcacatcgatgaggacaagctggatacaaactcggtttatgagccgtactatcacagcgatcacgctgagtcatcttgggtgaacaggggagagtcttcccggaaggcttacgaccataactccccgtacatctggccaagaaatgactatgatggctttctggagaacgctcacgaacatcacggtgtgtataaccagggcagaggcatcgattcaggcgagaggctgatgcagccaacgcagatgtctgcgcaggaggacctgggagatgacactggtatacatgtcatccccacccttaacggggatgatcggcacaagatcgttaacgttgatcagcgccaatacggcgacgtgtttaaaggcgatctgaacccgaaaccccaagggcagaggctgatcgaggtgtccgtggaggagaatcatccctttaccttgcgcgcacccatccagaggatctatggtgtcaggtacaccgagacatggtcctttctgccatctctgacctgcaccggagacgctgccccggccatccagcacatctgcctgaagcatacgacatgcttccaggacgtggtcgtggatgtagattgcgccgagaacacgaaggaggaccaactcgctgaaatttcttacagattccagggaaagaaagaagcagatcagccatggatcgtggttaacacctctactctttttgacgagcttgagctcgatcctcctgagatcgagcccggagttctcaaagtgctaaggacagagaaacagtacttgggtgtgtatatttggaacatgcgtggcagcgacggtacatctacctatgccacttttctggtcacatggaagggggatgaaaagacccgaaaccctacccccgctgtgactccacagcctcgcggcgcagagtttcatatgtggaattaccattcacacgtattcagcgtaggagacaccttctcactagcgatgcatctacagtataagatccacgaggctccattcgatctactcctggagtggttgtatgttcccatcgatcctacttgtcagccgatgagactgtattccacatgtctttaccatcctaatgccccgcagtgtctgagccatatgaacagtggctgtactttcacaagtccccatctggcgcagagggtggctagcacagtatatcagaactgtgaacacgctgataactataccgcctattgtcttggtatatcacacatggaaccttccttcgggctgatattgcacgacggaggcactacgttgaaatttgttgacactcccgaaagtcttagtggactctacgtgtttgtggtttatttcaacggacacgtcgaggctgtggcatatacagtggtgtccacggtggatcacttcgtgaatgctatagaggagcgtggcttccctcctacggcggggcagccccctgccaccaccaagcccaaggagatcactcccgtgaaccctggaaccagccctttgattcggtatgctgcatggaccgggggcttagcagctgtcgtgctgttatgcctggttatatttttaatctgtaccgccaagcggatgcgggtgaaagcgtatagggtggacaagagtccttataatcaatcaatgtattacgccgggctccccgttgatgatttcgaggacagcgagagtaccgacaccgaggaggagtttggtaacgccattggcggttcacacggcgggtcttcttatacagtgtatatcgacaaaacccgc

SEQ ID NO: 269 - RNA, 1869 nt, synthetic construct
  source 1..1869: mol_type = other RNA
atgggaacagtcaataaacctgtggtgggcgtgctgatgggcttcggcatcattaccggtacactgcgcattactaacccagtccgagctagtgtgttgagatatgatgattttcacatagatgaggataagctggacacaaactcggtttacgagccttactatcacagcgaccatgctgaatcatcttgggtgaacaggggagagtcttcacggaaggcttatgatcacaactccccttatatttggccaagaaatgattacgacggctttctggagaatgcccacgaacatcacggtgtgtataaccagggccgaggcatcgattcaggagagaggctgatgcagccaacccagatgtctgcacaggaggatctgggagatgacactggaatccatgtgatccctaccctcaacggtgacgaccggcacaagatcgttaacgttgatcagcgtcaatacggggacgtcttcaaaggcgaccttaacccgaagccacaggggcagaggctgatcgaagtatccgtggaggaaaaccatccatttaccttgcgggcaccgattcagagaatctatggagtgaggtacacggaaacttggtcttttctgcctagtctgacctgcaccggggacgctgctcctgccatacagcacatctgtctcaaacatacaacctgcttccaggacgtcgttgtcgatgtagactgcgccgaaaatacaaaggaggatcagctggctgagattagctacaggttccaggggaaaaaagaggctgaccaaccatggatcgtggttaacacttctactctctttgacgaacttgagctcgatcctcctgagatcgagcccggagttctcaaggtgctgcgaacagagaagcagtacttgggggtttatatctggaatatgcgtggcagcgacggtacatccacctacgcaactttcctggtcacatggaagggggacgaaaaaacccggaatcctaccccggctgtgactccacagcctagaggggcagagtttcacatgtggaattaccattctcacgtgttctctgtaggggataccttttcgctagctatgcatctccaatataagattcacgaggccccatttgatcttctgctggagtggttgtacgttccgatcgaccccacgtgtcagccgatgagattgtattctacctgtctttatcatccgaatgctccccagtgtttatctcacatgaactccgggtgtacttttactagtccacatctggcccagagagtggccagtacagtatatcagaactgcgagcatgctgacaattacacagcttactgccttggtatctcacacatggagccttcattcgggctcattctgcacgatggaggcaccacgctgaagtttgttgacactcccgaaagcctttctggcctttacgtgtttgtggtgtatttcaatggacacgtggaggcagtggcatacacagtggtcagcacggttgatcattttgtgaatgccatcgaggagcgtggttttcctcctacggcagggcagcctcctgcaactaccaagccaaaggagattacaccggtcaacccaggaaccagcccattgatccggtatgccgcttggaccggggggttggcagctgtagttctgctttgcctggttatatttttgatttgcaccgcaaagcgaatgcgggttaaagcctacagggtggacaaaagtccttataaccagtcaatgtattatgcgggcctcccggtggatgatttcgaagatagcgagagcaccgatacagaggaggagtttggtaatgcaatagggggttcccacggcggaagctcttatacagtgtatattgacaaaaccagg

SEQ ID NO: 270 - RNA, 1869 nt, synthetic construct
  source 1..1869: mol_type = other RNA
atgggaacagtgaataaacccgtcgtcggagtgcttatgggtttcgggatcatcactggtaccttgaggattaccaaccctgtccgtgcttcggtcttaagatatgatgatttccatattgacgaggataagctggatacgaactcggtttacgagccatactaccacagcgatcacgctgagtcatcctgggttaacaggggtgagtcatcccggaaggcttacgaccataactctccatacatatggcccagaaatgattatgacggctttctggaaaatgcacacgaacatcacggtgtgtataaccagggcagggggatcgatagcggcgaacggctgatgcagcctacccagatgagtgctcaggaggacctgggagatgacaccggtatccatgtcatccctaccctcaacggggacgaccggcacaaaattgtgaacgttgaccagcgccaatacggagatgtattcaaaggcgatctgaaccccaagccacaagggcagaggctgatcgaggtctcggtggaggagaaccatccttttacactgcgtgccccaatccagcggatatatggcgtgcgatacacggagacatggtctttcctgccttcactgacatgcacaggggacgctgccccggccattcagcacatttgtctgaagcatacgacctgcttccaggacgtggtcgtggacgtagattgcgccgaaaacacaaaggaggatcagctggctgaaatcagctacaggtttcaggggaagaaggaagccgaccaaccatggatcgttgttaacacttctacactctttgatgaacttgagctcgaccctcctgagatcgagcccggagtgctcaaagtgctgagaacagagaagcagtatttgggcgtgtatatatggaacatgcgtggcagcgatggaacatccacctacgccacctttctggtgacatggaaaggcgatgaaaagacgcggaaccctactccagctgtgactccacagccacgtggcgctgagtttcacatgtggaactaccattctcatgtgttcagcgtgggggataccttcagtctagcgatgcatctccaatataagattcacgaggccccatttgatctcctcctggagtggttgtatgtgccaatcgatccaacttgtcagccgatgagactgtattccacgtgtctttatcaccccaatgccccacagtgtttatcccacatgaactccggatgtactttcactagtccacatctcgcccagagagtggccagcacagtataccagaattgtgagcatgctgacaactataccgcctactgtcttggtatatcacacatggagccttcattcgggttaatattgcacgatggaggcactacgttgaagtttgttgacactccggagagcctgtctggcctctacgtttttgttgtgtatttcaatggacacgtcgaggccgtggcatacacagtcgtgtcgacggtcgatcattttgtgaatgctatcgaggagcgtggtttccctcctaccgctgggcagcctcctgcaacgaccaagccgaaggagatcacacccgtgaaccccggaaccagcccattgatccggtatgccgcttggaccggggggttggctgccgtggtgctgttgtgcctggttatttttcttatttgtacggcgaaaaggatgcgggtgaaagcctacagagtggacaagagtccctataaccagtcaatgtattacgcgggcttaccagtagatgatttcgaggattcagagagcacggatactgaagaagaattcggtaatgccataggtggttcacacgggggatcttcttatacagtgtatattgacaaaacccga

SEQ ID NO: 271 - RNA, 1869 nt, synthetic construct
  source 1..1869: mol_type = other RNA
atggggacagtcaacaagcccgtggtgggcgtacttatggggttcgggattattactggtacattgaggattactaatccagttcgagcttctgtcctccgctacgatgatttccacattgacgaggacaagctggacactaactcggtctatgagccatactatcacagcgatcacgctgagtcatcttgggtgaacaggggagagtcatcaaggaaggcctatgatcacaactccccgtacatatggccgagaaatgactacgatggctttctggagaatgctcacgaacatcacggtgtgtataaccagggccggggcattgatagcggagaacgcctgatgcagccaacccagatgtctgcgcaggaggatctgggtgatgatacaggtatccatgttatccctacccttaatggggatgacaggcacaaaatcgttaacgttgatcagcgccaatacggtgacgtgtttaaaggcgatctgaatccgaagccccagggacagaggctgatcgaggtgtccgttgaggagaaccacccttttaccttgcgtgcaccgattcagcggatctatggcgtgaggtacacggagacttggtcattcctgcctagcctgacctgcacaggggacgccgcccctgctatccagcacatctgcttgaagcatacgacctgttttcaggacgtggtggtggatgtagactgcgccgagaacacgaaggaggatcagctggccgaaataagctataggttccagggaaagaaggaagctgaccagccatggatcgtggttaacacttctactctctttgatgagcttgagctcgatccaccagagatcgagccaggagtcctcaaggtgctgcgcacagagaagcagtaccttggagtgtatatctggaacatgcgtggcagtgacggtacctccacctacgcaacctttctggtgacctggaagggagacgagaagacccgaaatcctacgccggcagtgaccccacagccccgcggggcagaatttcacatgtggaattatcattctcacgtgttcagcgtgggagacactttcagcctagccatgcacctccaatacaagatccacgaagcccctttcgatctactccttgagtggctgtatgttcctatcgatcctacttgtcagccgatgaggctgtacagtacttgcctataccatcccaatgctccgcagtgtttatctcatatgaactccggatgcacgttcaccagcccacatctcgcccagagagtggctagcacggtataccaaaactgcgagcatgctgacaattacaccgcctactgtcttggtatatcacacatggagccttcattcgggctaatactgcatgacggaggaaccacgttgaaatttgttgacacacccgagagcctgtctggtttgtacgtgtttgtggtctatttcaatggacacgtagaggccgtggcatacacagtggtaagcaccgttgatcactttgttaatgcaatcgaggagcgtggtttccctcctacggctgggcagcctcctgccactacaaagccaaaggagatcacacccgtgaatcccggaaccagcccattgattcggtatgcagcttggaccgggggcctggcagctgtcgtgctgctctgcttggttatttttctgatctgcactgccaagcgcatgcgggttaaagcctacagggtggacaaaagtccttataatcagtcaatgtattatgcgggcctgcctgtagatgatttcgaagacagcgagagcaccgacaccgaggaggagtttggtaatgccataggtggctcacacggcgggtcatcatatacagtgtatatcgataagacccgc

SEQ ID NO: 272 - RNA, 1869 nt, synthetic construct
  source 1..1869: mol_type = other RNA
atggggacagtgaacaaacccgtagtgggcgtacttatggggttcgggatcatcaccggtacattgaggataactaatccggtgcgggcttccgtcctgcgctatgatgattttcacatagacgaggacaagctcgatacaaactcggtttatgagccatactatcacagcgatcatgctgagtcaagctgggtgaataggggagagtctagccggaaggcctacgaccacaactccccgtatatatggcccagaaatgactatgatggctttctggagaatgctcacgaacatcacggtgtttataaccagggccgaggcatcgattccggcgagaggctgatgcagcccacgcagatgtctgcgcaggaagacctaggagatgacactggtatccatgtaatccctaccttgaacggggacgacagacacaaaattgtgaatgttgatcagcgccaatacggtgacgtgttcaagggcgatctgaacccaaagcctcaggggcagaggctgatcgaggtgagcgtcgaggaaaatcacccgtttaccttgcgggcacctattcagcgaatctatggagtaaggtacacggagacatggtcttttctgccttctctgacctgcacaggggatgccgcgccggccatccagcacatctgcctcaagcataccacatgcttccaggacgtggtcgtggatgtggattgtgccgagaacaccaaggaggaccagctggctgaaataagttacaggttccagggaaaaaaggaagctgatcaaccatggatagtggtgaatacttctaccctctttgacgaacttgagctggatccacctgagatcgagcccggagtgctcaaggtgctgcgcacagagaagcagtacctgggggtgtatatctggaacatgcgtggctctgacggtacttcgacttacgctactttcctggtgacatggaaaggggacgaaaagacaagaaatcccaccccggctgtgactccacagcctcggggtgcggagttccatatgtggaattaccattcacatgtgtttagcgtgggcgatacctttagcctagccatgcacctccagtacaagattcacgaggccccattcgatttgctcctggaatggttgtatgttcctatcgaccctacttgtcagccgatgagactgtatagtacatgtctttaccatcctaatgctcctcagtgtttatctcacatgaactccggatgtacatttactagtccacatctcgcccagagagtggctagcacagtataccagaactgcgagcatgctgacaactataccgcctactgccttggtatatcacacatggagcctagcttcgggctcatcctgcatgacggcggcactacgttgaaatttgtcgacactcccgaaagcctgtctggcctctacgtttttgttgtctatttcaacggccatgtcgaggcagtggcatacactgtggtttcgactgtggatcactttgtgaatgccattgaggagcgtggtttccctcctaccgcggggcagcccccggctactaccaagccaaaggagatcacacccgtgaacccgggaaccagccccttgatccggtatgccgcatggaccggcggcttggcagcggtcgtgctgctatgcctggttatatttttaatttgcaccgccaagcgaatgcgggttaaggcctacagggtggacaagagtccctataaccagtcaatgtactatgctggcctcccagtggacgatttcgaggacagcgagagcaccgacacggaggaggagtttggcaatgctatcggaggatcacatggcgggtctagttatacagtttatatcgacaaaacccgc

SEQ ID NO: 273 - RNA, 1869 nt, synthetic construct
  source 1..1869: mol_type = other RNA
atgggaactgtgaacaaaccagtggtcggcgtgcttatggggttcggaatcatcacaggcactttgcggattactaacccagttagagcttccgtcctgagatacgatgactttcatatagatgaggacaaactggacacaaattcggtttacgagccctactatcacagcgatcacgctgagtcatcttgggtgaatcgcggtgagtcttccaggaaggcttatgaccacaactccccgtacatctggccaagaaacgattacgacgggtttctggagaacgctcacgaacatcacggtgtgtataaccagggccgaggcatcgatagcggagagaggctgatgcagccaacgcagatgtctgcgcaggaggaccttggggatgacactggtatccacgtcatcccaaccctgaacggggacgatcggcacaaaatcgttaacgttgatcagcgccaatatggtgacgtgttcaagggagacctgaatccgaagccacaagggcagagactgatcgaggtttccgtcgaggaaaatcacccatttaccttgcgggctccgattcagcgaatctatggggttcgatatacggagacatggtcatttctgccctcacttacttgcaccggggacgccgctcctgctatacagcacatttgtctgaagcacaccacgtgcttccaggacgtggttgtggatgtagactgtgccgagaatacaaaggaagatcagctggctgaaataagctacaggtttcaaggaaagaaggaggccgatcaaccatggatcgtggtgaacacttctactctgtttgacgagcttgagctcgatccgcctgagatcgagcccggggttttgaaggtgctgcgcacagagaagcagtacctgggagtttatatctggaacatgcgtggcagcgacgggacatctacctatgctactttcttggtgacatggaagggggacgaaaaaacccgaaatcctacccctgcagtgactcctcagcctcggggggcagagtttcacatgtggaattaccattctcatgtctttagcgtaggagatacgttcagcctagccatgcatctccagtataaaattcacgaggccccattcgatctgctcctggaatggctgtatgtgccaatcgatcctacttgtcagccgatgagactgtatagtacatgtctttaccatcccaatgctccacagtgcttgagccacatgaattccggatgtactttcactagccctcacctcgctcagagagtggccagcacagtataccagaattgcgagcatgctgacaactatacagcctactgtcttggtatatcacacatggagccatctttcgggctcatactgcatgacggaggcactacgttgaaatttgttgacactcccgaaagcctgtctggcctctacgtttttgtggtttatttcaatggacacgtcgaagcagtggcctacacggtggtcagcaccgttgaccactttgtgaatgcgatcgaggagcgtggtttcccgcccacggcggggcagccccctgccacaaccaagcccaaggagatcacacctgtgaaccccggaacctcacccttgatccgttatgccgcgtggaccggaggcttggctgccgtggtgctgctttgcctggttatatttttaatctgcaccgccaaacggatgcgggttaaagcctacagggtggacaaaagtccctataatcagtcaatgtactatgctggcttgcctgtggatgattttgaagacagcgaaagcaccgacaccgaggaagaatttggtaatgccattggtggttctcacggtgggagctcatatacagtgtatatcgataaaacccgc

SEQ ID NO: 274 - RNA, 1869 nt, synthetic construct
  source 1..1869: mol_type = other RNA
atgggcacagtgaataaacccgtggtgggcgtacttatggggttcggaatcataacaggtacattgaggatcactaatccagtccgcgcttctgtgttaagatatgacgattttcatatcgacgaggacaagctggatacaaactcggtttacgagccgtactaccacagcgatcacgctgaatcttcttgggtcaataggggagagtcttcccggaaggcttacgaccacaattccccttacatatggccaagaaatgattatgatggctttctggagaacgcccacgagcatcacggtgtgtataaccagggacgaggtatcgattccggcgaaagactgatgcagcctacccagatgtctgctcaggaggacctgggagatgacactggtatccatgtcatcccaaccctgaacggggacgatcggcacaaaatcgttaatgttgatcagcgtcagtacggcgacgtgttcaaaggcgatctgaatcccaaaccacaagggcagaggctaatcgaggtgtcagtggaggaaaatcatccttttaccttgagagcaccgattcagcggatctatggagtaaggtatactgaaacatggtcttttctgcctagcctgacttgtaccggggacgcagccccggctatacagcatatctgtcttaagcatacgacctgcttccaggacgtggtcgtggatgtagactgcgccgagaatacaaaggaagatcagctggctgagatcagctataggttccaaggaaagaaggaggcagaccaaccctggatcgtggttaacacttctactctctttgacgagcttgagcttgacccaccggagatcgagcccggagtcctcaaagtgctccgcacagagaagcagtacttgggggtgtatatctggaatatgcgtggcagcgacggtacgtccacctacgctacttttctggtgacatggaagggggatgaaaaaacccgaaaccctacccctgctgtgactccacagcctagaggggcagagtttcacatgtggaattaccattcccatgtgtttagcgtgggcgataccttcagcttggcgatgcatctgcagtacaaaattcacgaggcccccttcgatctccttctggagtggttgtatgtcccgatcgatcctacttgtcagccgatgagactgtacagtacatgtctttaccatcctaacgctccccagtgtttatctcatatgaactcaggatgtactttcacttctccacatctcgcccagagagtggcgagcacagtataccagaactgcgagcatgctgacaactatacagcatactgccttggtatatcacacatggagccttcattcgggcttatactgcatgacggaggcactacgttgaagtttgttgatactccggagagcctgtctggcctgtatgtttttgttgtgtacttcaatgggcacgtggaggccgtggcatacacagtggtcagcacggtcgatcactttgtgaatgccatcgaggagcgcgggttccctcctacggcggggcagccgcctgctaccaccaagcccaaggagatcacacccgtgaatcccggaaccagccccttgatccggtatgccgcttggaccggtggattggcagctgtcgtgttgctttgcctggttattttcttaatctgcaccgctaagcgcatgcgggttaaagcctatagggtggacaaaagtccctataaccagagcatgtactatgccggcctccctgttgatgatttcgaagatagcgagtctacggacaccgaagaagaatttgggaacgccataggaggttcccacggcggatcttcttatacggtgtacatcgataagacccgc

SEQ ID NO: 275 - RNA, 1869 nt, synthetic construct
  source 1..1869: mol_type = other RNA
atgggaactgtcaataagcctgtggtgggcgtgcttatgggcttcgggatcatcaccggtactttgaggattactaatccagtccgagcttccgtgctgagatatgatgatttccatatagatgaggacaagctggatacaaattcggtctacgagccatactatcacagcgaccacgctgagtcatcctgggtgaacaggggagagtcgagtcggaaggcttatgaccataactccccatacatttggcctcggaatgattacgatggctttctggagaatgcccacgaacatcacggtgtgtataaccagggcaggggcatcgatagcggcgaaaggctgatgcagcccacccaaatgtcagcgcaggaggatctgggagatgacactggtatccatgtcatccctacactgaacggggacgatcgacacaaaatcgttaacgtcgatcagcgccaatacggggacgtcttcaaaggcgatctgaacccgaagcctcaagggcaaaggctgatcgaggtgtccgttgaggagaatcacccattcaccttgcgggccccgattcaacggatctacggagtgaggtataccgaaacttggtcttttctcccttcactgacctgtaccggggacgctgcaccggccattcagcacatctgtctgaagcatacgacctgcttccaggacgtggtcgtggacgtagactgtgccgagaacacgaaggaggaccagctggctgagataagctacaggttccagggaaagaaagaggctgaccagccgtggatcgtggtcaatacttctactctctttgatgagcttgagttggatcctcctgagattgagcctggagttctcaaggtgctgcggacagaaaagcagtaccttggggtgtatatctggaacatgcggggctctgacggtacatccacctatgctacctttctggtaacttggaaaggggatgaaaaaactcgaaaccctacgcctgctgtgactccacagcctcgtggggcagagtttcacatgtggaattatcattctcacgtgttcagcgtaggtgataccttcagcctggcaatgcatcttcagtataagattcacgaggcacctttcgatttgctcctggagtggttgtatgtccctatcgatcctacttgtcagccgatgagactgtatagtacatgtctttaccatcccaatgctccccagtgcttgtcacacatgaacagcggatgtactttcacatctccacatctagcccagcgagtggcaagtacagtataccagaactgtgagcatgctgacaactacaccgcctactgtcttggtatatcacacatggagccttcattcgggctcatactgcacgacggaggcactacgctgaaatttgtggacactcctgaaagcctgtctggtctctatgtttttgttgtgtatttcaacggccacgtggaggccgtggcatacacagtggtcagcaccgtggatcactttgttaatgcaatcgaggagcgtggttttcctcctacggcggggcagccacctgccacgaccaagcccaaggagatcacacccgtgaacccgggaaccagccccttgatccggtatgccgcttggaccgggggtttggcagccgtcgtgctgctctgtctggttatatttttaatctgcaccgccaagcgaatgcgggttaaagcctatagggtggacaagagtccctataaccaatcaatgtattatgcaggtcttcctgtagatgatttcgaagactctgagagtaccgacaccgaggaggagttcggaaatgccataggaggctcacacggggggtcctcttacacagtttacatcgacaagacaaga

SEQ ID NO: 276 - RNA, 1869 nt, synthetic construct
  source 1..1869: mol_type = other RNA
atggggaccgtcaacaagcccgtcgtgggcgtgcttatggggttcgggatcatcaccggtacactccgcattactaatccagtacgagcttcagtcctgcgttatgatgatttccacattgatgaggacaagctggacacaaacagcgtttatgagccatattaccacagcgatcacgctgagtcatcttgggtcaataggggcgagtctagccggaaggcatacgaccataacagtccttacatttggccgcggaatgattatgatggatttctggagaatgctcacgaacatcacggtgtgtataatcagggtcgaggcattgatagcggggaaaggctgatgcaaccaacgcagatgtctgcgcaggaggacctgggcgatgatactggcatacatgtcatccccactctgaatggggacgacagacacaaaattgttaacgttgatcagcgccaatacggtgacgtgtttaagggcgatctgaaccctaagccacaaggccagaggctgatcgaggtgtctgtagaggaaaatcacccgtttaccctgcgggcacctattcagcggatctacggagtgaggtatacggaaacatggtcttttctgccttctctgacctgcaccggggacgctgccccggctatacagcacatctgtctgaagcatacaacctgcttccaggacgtggtcgtggatgtcgattgcgccgagaacacaaaggaggatcagctggctgaaataagctacaggttccagggcaagaaggaggctgaccagccatggattgtggtgaacacatccactctgttcgacgagcttgagctagatccacctgagatcgagcccggagttctcaaggtgctgcggaccgagaagcagtatcttggggtgtatatctggaacatgcgtggctctgatggcacaagcacgtacgctacgtttcttgtgacatggaagggggacgaaaagacccggaatccgacccctgctgtgactccccagcctcgtggcgcagagttccacatgtggaattatcatagccatgtgttcagcgtgggagataccttcagcctagccatgcatctccaatacaagattcacgaggccccattcgatctactcctggaatggttgtatgttcctatcgatcctacttgtcagccgatgagactgtacagtacctgtctgtaccatcccaatgctccccagtgtttaagtcatatgaactctggatgtactttcactagtccacatctcgcacagagagtggccagcacagtatatcagaactgcgagcatgctgacaactataccgcctactgtctgggtataagccacatggagccttcattcgggctcatacttcatgacggagggactacattgaagtttgttgacactccagagagcctgagtggcttatacgtgtttgttgtgtattttaatgggcacgttgaggccgtggcttacacagtggtcagcacggtcgatcactttgtcaatgccatcgaggaacgtggtttcccccctacggcggggcaaccacccgctacgaccaagcccaaggagatcacacccgtgaaccccggaacaagccctttgatccgctatgccgcctggacggggggcttggcagccgttgttctgctttgcctggttatattcttaatttgcaccgccaaacgcatgcgagttaaagcttacagagtggacaagagtccatataaccagagtatgtattatgcgggcctcccggtagatgatttcgaggatagcgagtctaccgatacggaggaggagtttggtaatgctataggcgggtcacacggcgggtcttcttatacagtgtatatagacaagactcgc

SEQ ID NO: 277 - RNA, 1869 nt, synthetic construct
  source 1..1869: mol_type = other RNA
atgggcacagtcaataaacctgtggtgggcgtgctcatgggcttcggaatcatcaccgggacattaaggattaccaatcctgtccgagcctccgttctgcgctatgatgactttcacatagatgaggacaagctggacaccaactcggtttacgagccatactatcatagcgatcatgccgagtcctcttgggtgaacaggggagagtcttcccggaaagcttatgaccacaatagcccgtacatttggccgcgaaatgactatgatggctttctggagaatgctcatgaacatcacggtgtgtataatcagggacgaggcatagatagcggcgaaaggctcatgcagccaacacagatgtctgcgcaggaggacctgggagatgacactgggatccatgtcatccctaccctgaacggggacgaccggcataaaatcgttaacgttgatcagcgccaatacggtgacgtgttcaagggcgatctgaatccgaagccccaggggcagaggctgattgaggtgtcggtggaggaaaatcatcccttcacattgcgcgcacccatacagcggatttacggagtgaggtatacggagacatggtcttttctgccctctctgacctgcaccggggacgccgccccggctatccagcacatctgtctgaagcacactacctgcttccaggacgtggtcgtggatgtggactgcgccgagaacacaaaggaggaccagctggctgagataagctataggttccaaggaaagaaggaagctgaccaaccttggatcgtggtgaacacttctactctctttgatgagctcgagctggacccacctgagatcgagcccggagttctcaaggtcctgcgcacagaaaagcagtatttgggggtgtatatctggaacatgcgcggcagtgacgggacatccacatacgctacttttctggtcacctggaagggggatgaaaaaacccgaaatcctaccccagcagtgactccacagcctcgtggcgcagagtttcacatgtggaattatcattcccatgtgttcagcgtgggggatacattcagcctggcgatgcacctccaatacaaaatccacgaggccccatttgatctactcctggagtggttgtatgtgcctatcgaccccacatgtcagccgatgagactgtattcaacatgtctttaccatccaaatgctccacagtgtttatcccatatgaactcagggtgtacttttaccagtccccatctcgctcagcgggtggccagtacggtataccagaactgcgagcatgctgacaactatacagcctactgtcttggtatctcacatatggagccttcattcgggctgatcctgcacgacggaggcaccacgttgaagtttgttgacactcccgagagcctctcaggtctgtatgtgtttgtggtatatttcaatggacacgttgaagccgtggcatacacagtagtgtctacggtcgatcactttgtgaacgctatcgaggagcgtggtttccctcctacggcgggccagcctccagccacaaccaagcctaaggagatcacacccgtgaaccccggaactagccccttgatacggtatgccgcttggaccgggggtctggcggctgtggtgctgttatgtctggttatatttttgatctgcaccgctaagcggatgcgggtgaaggcctatagggtagacaaaagtccatataaccagtcaatgtattatgccggcctcccggtagatgattttgaggacagcgagagcaccgacaccgaggaggagttcggtaacgctatagggggctctcatggcgggagttcatatacagtgtatatcgacaagactcgc

SEQ ID NO: 278 - RNA, 1869 nt, synthetic construct
  source 1..1869: mol_type = other RNA
atgggaacggtcaacaagcccgtggtgggggtgcttatggggttcgggatcatcaccggtacactgaggattactaatccagtccgagcttcagtcctgaggtacgatgattttcacattgacgaggacaaactggacacaaatagcgtgtacgaaccttactatcacagcgaccacgctgagtcatcatgggttaacaggggagagagtagccggaaggcttatgaccataactccccctacatttggcccagaaatgactatgacggctttctggagaacgctcacgaacatcatggtgtgtataatcaggggcgagggatcgattcgggcgaaaggctgatgcagccaacacagatgtctgcgcaggaggacctgggcgatgatacaggtatccatgtcatcccaaccctgaacggggacgaccggcacaaaatcgttaacgtcgatcagcgccaatatggtgacgtgttcaagggcgatctgaatccgaaaccacaggggcagaggctgatcgaggtatccgttgaggaaaatcaccctttcaccctgcgggcaccgattcagcggatctatggagtgaggtacacagagacttggtcctttctgccatctctgacctgtaccggggacgctgcccccgctatccaacacatctgcctgaagcacacgacctgcttccaggacgtggtcgtggatgtagattgcgccgagaacacaaaggaggatcagctcgctgagatcagctacaggttccagggaaagaaggaagctgaccagccatggatcgtggttaacacttctactctctttgatgaacttgagctagaccctcctgagatcgagcccggagttctcaaggtgctccgcacagagaagcagtacctgggggtgtatatctggaatatgcgtggaagcgatggtacctccacatacgctacttttctggttacctggaagggtgacgaaaagacccgaaatcctacccctgcggtgactccacagccccgcggggcagagtttcacatgtggaattatcattctcatgtgttcagcgtaggggataccttctctctagccatgcatctccaatacaagattcacgaggcccctttcgatctactcctggagtggttgtatgtaccaatcgatcctacttgtcagccgatgagactgtattcgacatgtctctaccaccctaatgctcctcagtgtttaagccacatgaattccggatgtacgtttactagtccacatctggcccagagagtggccagtaccgtataccagaattgcgagcatgctgacaactacaccgcctactgtttagggatatcccacatggaaccttctttcgggctgattttgcatgacggaggcactactttgaagtttgttgacactcccgaaagcctgtcgggcctatacgtttttgtggtttacttcaatggacatgtcgaggcggtggcttacacggttgtgtctacggtagatcattttgtgaatgcaatcgaggagcgtggttttcctcctacggcggggcagccccctgccaccacaaagccaaaggagatcacacccgtgaacccgggaaccagccccttgatccggtatgcagcttggaccgggggcttggcagctgtcgtcctgctttgtctggtcatatttttaatctgcaccgccaagcggatgcgggttaaagcataccgagtagataagtccccctacaaccagtccatgtactatgcggggctgcctgtggatgattttgaagactccgagagcacggacaccgaggaggagtttggaaacgccataggaggatcacatggagggtcttcttatactgtttatatcgacaaaacccgc

SEQ ID NO: 279 - RNA, 1869 nt, synthetic construct
  source 1..1869: mol_type = other RNA
atgggtaccgttaataaacccgtggtgggagtgcttatgggttttgggatcatcactggtacattgaggattactaatccagtgcgagctagtgtcctgagatacgatgatttccacattgatgaggataagctggatacaaactcggtttatgagccatactatcacagcgatcacgctgagtcatcttgggtgaacaggggagagtctagccggaaggcttacgaccataactccccgtatatatggccccgaaatgattatgatgggtttctggaaaacgctcacgaacatcacggtgtgtataaccagggccgcggcatcgatagcggtgaaaggctgatgcagcctacccagatgagtgcgcaggaggacctgggagatgacactggtatccacgtcattcctaccctgaacggggacgatcggcataaaatcgtcaacgttgatcagcgccaatacggtgacgtgttcaagggcgatctgaaccctaaaccacaagggcagaggctgatcgaagtgtccgttgaggagaatcacccgtttaccttgcgggcaccgattcagcggatctacggagtcaggtatacggagacttggtctttcctgccttctctgacctgcaccggggacgccgccccggctatacagcacatctgtctgaagcatactacctgtttccaggacgtggtcgtcgatgtagattgcgccgagaacactaaggaggatcagctggcagagataagctacaggttccagggaaagaaggaagctgaccagccatggatcgtggttaacacttctactctctttgacgagcttgagctggatcctcctgagatcgagcccggagtgctcaaggtgttgcgcacagagaagcagtacctgggggtgtatatctggaatatgcgtggctctgacggtacaagtacctacgctactttcctggtgacatggaagggggacgagaaaacccgaaaccctacccccgctgtcactccacagcctcgtggggcagagtttcacatgtggaattatcattctcatgtctttagcgtaggagacacctttagcctagcgatgcatctccagtacaagattcacgaggccccattcgatctactcctggaatggctttatgttcctatcgatcctacttgtcagccgatgagactgtattctacatgtctgtaccatcccaatgctccccagtgtttatctcacatgaactccggttgtacttttactagtccacatctcgcccagagagtggccagcacagtataccagaactgcgagcacgccgacaactatacggcctattgtctgggtatatcacacatggagcccagtttcgggctcatcctgcatgacggaggaacaacgctgaagttcgtagatactccggaaagcttatctggcctctacgttttcgtggtatatttcaatggacacgtcgaggccgtagcatataccgtggtgagcaccgttgaccacttcgtgaatgcgatcgaggagcgtggattccctcctacggcggggcagcctcctgccacgaccaagcccaaggaaatcacacccgtgaaccccgggaccagccccttgattcggtatgctgcttggaccggcggcctcgcagctgtggtgctgctttgtctggttatcttcttgatctgcaccgccaaacgcatgcgggttaaagcctacagggtggataaaagtccttataaccagtcaatgtactacgccggactcccggtagatgatttcgaagacagcgagagcaccgataccgaggaggagttcggtaacgccatcggaggtagccacggcgggtcttcttatacagtgtatatagacaagacccgc

SEQ ID NO: 280 - DNA, 53 bp, synthetic construct
  source 1..53: mol_type = other DNA
agaataaactagtattcttctggtccccacagactcagagagaacccgccacc

SEQ ID NO: 281 - RNA, 53 nt, synthetic construct
  source 1..53: mol_type = other RNA
agaataaactagtattcttctggtccccacagactcagagagaacccgccacc

SEQ ID NO: 282 - RNA, 53 nt, synthetic construct
  source 1..53: mol_type = other RNA
  modified_base 5: mod_base = m1f
  modified_base 10: mod_base = m1f
  modified_base 13: mod_base = m1f
  modified_base 15..16: mod_base = m1f
  modified_base 18..19: mod_base = m1f
  modified_base 21: mod_base = m1f
  modified_base 24: mod_base = m1f
  modified_base 35: mod_base = m1f
agaanaaacnagnanncnncnggnccccacagacncagagagaacccgccacc

SEQ ID NO: 283 - DNA, 295 bp, synthetic construct
  source 1..295: mol_type = other DNA
ctcgagctggtactgcatgcacgcaatgctagctgcccctttcccgtcctgggtaccccgagtctcccccgacctcgggtcccaggtatgctcccacctccacctgccccactcaccacctctgctagttccagacacctcccaagcacgcagcaatgcagctcaaaacgcttagcctagccacacccccacgggaaacagcagtgattaacctttagcaataaacgaaagtttaactaagctatactaaccccagggttggtcaatttcgtgccagccacaccctggagctagc

SEQ ID NO: 284 - RNA, 295 nt, synthetic construct
  source 1..295: mol_type = other RNA
ctcgagctggtactgcatgcacgcaatgctagctgcccctttcccgtcctgggtaccccgagtctcccccgacctcgggtcccaggtatgctcccacctccacctgccccactcaccacctctgctagttccagacacctcccaagcacgcagcaatgcagctcaaaacgcttagcctagccacacccccacgggaaacagcagtgattaacctttagcaataaacgaaagtttaactaagctatactaaccccagggttggtcaatttcgtgccagccacaccctggagctagc

SEQ ID NO: 285 - RNA, 295 nt, synthetic construct
  source 1..295: mol_type = other RNA
  modified_base 2: mod_base = m1f
  modified_base 8: mod_base = m1f
  modified_base 11: mod_base = m1f
  modified_base 14: mod_base = m1f
  modified_base 18: mod_base = m1f
  modified_base 27: mod_base = m1f
  modified_base 30: mod_base = m1f
  modified_base 34: mod_base = m1f
  modified_base 40..42: mod_base = m1f
  modified_base 47: mod_base = m1f
  modified_base 50: mod_base = m1f
  modified_base 54: mod_base = m1f
  modified_base 63: mod_base = m1f
  modified_base 65: mod_base = m1f
  modified_base 75: mod_base = m1f
  modified_base 80: mod_base = m1f
  modified_base 87: mod_base = m1f
  modified_base 89: mod_base = m1f
  modified_base 92: mod_base = m1f
  modified_base 99: mod_base = m1f
  modified_base 105: mod_base = m1f
  modified_base 113: mod_base = m1f
  modified_base 121: mod_base = m1f
  modified_base 123: mod_base = m1f
  modified_base 126: mod_base = m1f
  modified_base 129..130: mod_base = m1f
  modified_base 140: mod_base = m1f
  modified_base 157: mod_base = m1f
  modified_base 163: mod_base = m1f
  modified_base 172..173: mod_base = m1f
  modified_base 178: mod_base = m1f
  modified_base 205: mod_base = m1f
  modified_base 208..209: mod_base = m1f
  modified_base 214..216: mod_base = m1f
  modified_base 222: mod_base = m1f
  modified_base 232..234: mod_base = m1f
  modified_base 238: mod_base = m1f
  modified_base 243: mod_base = m1f
  modified_base 245: mod_base = m1f
  modified_base 248: mod_base = m1f
  modified_base 259..260: mod_base = m1f
  modified_base 263: mod_base = m1f
  modified_base 267..269: mod_base = m1f
  modified_base 272: mod_base = m1f
  modified_base 286: mod_base = m1f
  modified_base 292: mod_base = m1f
cncgagcnggnacngcangcacgcaangcnagcngccccnnncccgnccngggnaccccgagncncccccgaccncgggncccaggnangcncccaccnccaccngccccacncaccaccncngcnagnnccagacaccncccaagcacgcagcaangcagcncaaaacgcnnagccnagccacacccccacgggaaacagcagngannaaccnnnagcaanaaacgaaagnnnaacnaagcnanacnaaccccagggnnggncaannncgngccagccacacccnggagcnagc

SEQ ID NO: 286 - DNA, 110 bp, synthetic construct
  source 1..110: mol_type = other DNA
aaaaaaaaaaaaaaaaaaaaaaaaaaaaaagcatatgactaaaaaaaaaaaaaaaaaaaaaaaaaaaaaaaaaaaaaaaaaaaaaaaaaaaaaaaaaaaaaaaaaaaaaa

SEQ ID NO: 287 - RNA, 110 nt, synthetic construct
  source 1..110: mol_type = other RNA
aaaaaaaaaaaaaaaaaaaaaaaaaaaaaagcatatgactaaaaaaaaaaaaaaaaaaaaaaaaaaaaaaaaaaaaaaaaaaaaaaaaaaaaaaaaaaaaaaaaaaaaaa

SEQ ID NO: 288 - RNA, 110 nt, synthetic construct
  source 1..110: mol_type = other RNA
  modified_base 34: mod_base = m1f
  modified_base 36: mod_base = m1f
  modified_base 40: mod_base = m1f
aaaaaaaaaaaaaaaaaaaaaaaaaaaaaagcanangacnaaaaaaaaaaaaaaaaaaaaaaaaaaaaaaaaaaaaaaaaaaaaaaaaaaaaaaaaaaaaaaaaaaaaaa

SEQ ID NO: 289-311 - skipped (23 entries)

SEQ ID NO: 312 - RNA, 47 nt, synthetic construct
  source 1..47: mol_type = other RNA
agaataaactagtattcttctggtccccacagactcagagagaaccc

SEQ ID NO: 313 - RNA, 42 nt, synthetic construct
  source 1..42: mol_type = other RNA
aaactagtattcttctggtccccacagactcagagagaaccc

SEQ ID NO: 314 - RNA, 278 nt, synthetic construct
  source 1..278: mol_type = other RNA
ctggtactgcatgcacgcaatgctagctgcccctttcccgtcctgggtaccccgagtctcccccgacctcgggtcccaggtatgctcccacctccacctgccccactcaccacctctgctagttccagacacctcccaagcacgcagcaatgcagctcaaaacgcttagcctagccacacccccacgggaaacagcagtgattaacctttagcaataaacgaaagtttaactaagctatactaaccccagggttggtcaatttcgtgccagccacacc

SEQ ID NO: 315 - RNA, 109 nt, synthetic construct
  source 1..109: mol_type = other RNA
aaaaaaaaaaaaaaaaaaaaaaaaaaaaaagcatatgactaaaaaaaaaaaaaaaaaaaaaaaaaaaaaaaaaaaaaaaaaaaaaaaaaaaaaaaaaaaaaaaaaaaaa

SEQ ID NO: 316 - RNA, 109 nt, synthetic construct
  source 1..109: mol_type = other RNA
  modified_base 34: mod_base = m1f
  modified_base 36: mod_base = m1f
  modified_base 40: mod_base = m1f
aaaaaaaaaaaaaaaaaaaaaaaaaaaaaagcanangacnaaaaaaaaaaaaaaaaaaaaaaaaaaaaaaaaaaaaaaaaaaaaaaaaaaaaaaaaaaaaaaaaaaaaa

SEQ ID NO: 317 - RNA, 284 nt, synthetic construct
  source 1..284: mol_type = other RNA
ctcgagctggtactgcatgcacgcaatgctagctgcccctttcccgtcctgggtaccccgagtctcccccgacctcgggtcccaggtatgctcccacctccacctgccccactcaccacctctgctagttccagacacctcccaagcacgcagcaatgcagctcaaaacgcttagcctagccacacccccacgggaaacagcagtgattaacctttagcaataaacgaaagtttaactaagctatactaaccccagggttggtcaatttcgtgccagccacacc

SEQ ID NO: 318 - RNA, 284 nt, synthetic construct
  source 1..284: mol_type = other RNA
  modified_base 2: mod_base = m1f
  modified_base 8: mod_base = m1f
  modified_base 11: mod_base = m1f
  modified_base 14: mod_base = m1f
  modified_base 18: mod_base = m1f
  modified_base 27: mod_base = m1f
  modified_base 30: mod_base = m1f
  modified_base 34: mod_base = m1f
  modified_base 40..42: mod_base = m1f
  modified_base 47: mod_base = m1f
  modified_base 50: mod_base = m1f
  modified_base 54: mod_base = m1f
  modified_base 63: mod_base = m1f
  modified_base 65: mod_base = m1f
  modified_base 75: mod_base = m1f
  modified_base 80: mod_base = m1f
  modified_base 87: mod_base = m1f
  modified_base 89: mod_base = m1f
  modified_base 92: mod_base = m1f
  modified_base 99: mod_base = m1f
  modified_base 105: mod_base = m1f
  modified_base 113: mod_base = m1f
  modified_base 121: mod_base = m1f
  modified_base 123: mod_base = m1f
  modified_base 126: mod_base = m1f
  modified_base 129..130: mod_base = m1f
  modified_base 140: mod_base = m1f
  modified_base 157: mod_base = m1f
  modified_base 163: mod_base = m1f
  modified_base 172..173: mod_base = m1f
  modified_base 178: mod_base = m1f
  modified_base 205: mod_base = m1f
  modified_base 208..209: mod_base = m1f
  modified_base 214..216: mod_base = m1f
  modified_base 222: mod_base = m1f
  modified_base 232..234: mod_base = m1f
  modified_base 238: mod_base = m1f
  modified_base 243: mod_base = m1f
  modified_base 245: mod_base = m1f
  modified_base 248: mod_base = m1f
  modified_base 259..260: mod_base = m1f
  modified_base 263: mod_base = m1f
  modified_base 267..269: mod_base = m1f
  modified_base 272: mod_base = m1f
cncgagcnggnacngcangcacgcaangcnagcngccccnnncccgnccngggnaccccgagncncccccgaccncgggncccaggnangcncccaccnccaccngccccacncaccaccncngcnagnnccagacaccncccaagcacgcagcaangcagcncaaaacgcnnagccnagccacacccccacgggaaacagcagngannaaccnnnagcaanaaacgaaagnnnaacnaagcnanacnaaccccagggnnggncaannncgngccagccacacc

What is claimed is:

1. An RNA molecule comprising at least one open reading frame encoding a varicella-zoster virus (VZV) glycoprotein E (gE) polypeptide.

2. The RNA molecule of claim 1, wherein the VZV polypeptide is a full-length, truncated, fragment or variant thereof.

3. The RNA molecule of claim 1, wherein the VZV polypeptide comprises at least one mutation.

4. The RNA molecule of claim 1, wherein the VZV polypeptide has at least 90%, 95, 96%, 97%, 98% or 99% identity to any one of the amino acid sequences selected from SEQ ID NO: 1 to 11.

5. The RNA molecule of claim 1, wherein the open reading frame is transcribed from a nucleic acid sequence having at least 90%, 95, 96%, 97%, 98% or 99% identity to any one of the sequences selected from SEQ ID NO: 12 to 145.

6. The RNA molecule of claim 1, wherein the open reading frame comprises a nucleic acid sequence having at least 90%, 95, 96%, 97%, 98% or 99% identity to any one of the sequences selected from SEQ ID NO: 146 to 279.

7. The RNA molecule of claim 1, wherein the open reading frame comprises a nucleic acid sequence selected from any one of SEQ ID NO: 146 to 279.

8. The RNA molecule of claim 1, further comprising a 5′ untranslated region (5′ UTR).

9. The RNA molecule of claim 8, wherein the 5′ UTR comprises a sequence selected from any one of SEQ ID NO: 281, 312 or 313.

10. The RNA molecule of claim 1, further comprising a 3′ untranslated region (3′ UTR).

11. The RNA molecule of claim 10, wherein the 3′ UTR comprises the sequence selected from any one of SEQ ID NO: 284, 314 or 317.

12. The RNA molecule of claim 1, wherein the RNA molecule further comprises a 5′ cap moiety and/or a 3′ poly-A tail.

13. The RNA molecule of claim 12, wherein the poly-A tail comprises a sequence selected from any one of SEQ ID NO: 287 or 315.

14. The RNA molecule of claim 1, wherein the open reading frame comprises a G/C content of at least 55%, at least 60%, at least 65%, at least 70%, at least 75%, about 50% to 75%, or about 55% to 70%.

15. The RNA molecule of claim 1, wherein the encoded VZV polypeptide localizes in the cellular membrane, localizes in the Golgi and/or is secreted.

16. The RNA molecule of claim 1, wherein the RNA comprises at least one modified nucleotide.

17. The RNA molecule of claim 1, wherein each uridine is replaced by N1-methylpseudouridine (ψ).

18. The RNA molecule of claim 1, wherein the RNA is a mRNA.

19. A composition comprising the RNA molecule of claim 1, wherein the RNA molecule is formulated in a lipid nanoparticle (LNP).

20. The composition of claim 19, wherein the lipid nanoparticle comprises at least one of a cationic lipid, a PEGylated lipid, a neutral lipid, and a steroid or steroid analog.

21. The composition of claim 20, wherein the cationic lipid is (4-hydroxybutyl)azanediyl)bis(hexane-6,1-diyl)bis(2-hexyldecanoate) (ALC-0315).

22. The composition of claim 20, wherein the PEGylated lipid is PEG-modified phosphatidylethanolamine, PEG-modified phosphatidic acid, PEG-modified ceramides (e.g. PEG-CerC14 or PEG-CerC20), PEG-modified dialkylamines, PEG-modified diacylglycerols, PEG-modified dialkylglycerols, 2-[(polyethylene glycol)-2000]-N,N-ditetradecylacetamide (ALC-0159), glycol-lipids including PEG-c-DOMG, PEG-c-DMA, PEG-s-DMG,N-[(methoxy polyethylene glycol)2000)carbamyl]-1,2-dimyristyloxlpropyl-3-amine (PEG-c-DMA), and PEG-2000-DMG, PEGylated diacylglycerol (PEG-DAG) such as 1-(monomethoxy-polyethyleneglycol)-2,3-dimyristoylglycerol (PEG-DMG), a PEGylated phosphatidylethanoloamine (PEG-PE), a PEG succinate diacylglycerol (PEG-S-DAG) such as 4-O-(2′,3′-di(tetradecanoyloxy)propyl-1-O-((o-methoxy(polyethoxy)ethyl)butanedioate (PEG-S-DMG), a PEGylated ceramide (PEG-cer), or a PEG dialkoxypropylcarbamate such as co-methoxy(polyethoxy)ethyl-N-(2,3di(tetradecanoxy)propyl)carbamate or 2,3-di(tetradecanoxy)propyl-N-(u>-methoxy(polyethoxy)ethyl)carbamate.

23. The composition of claim 20, wherein the neutral lipid is 1,2-distearoyl-sn-glycero-3-phosphocholine (DSPC), distearoylphosphatidylcholine (DSPC), dioleoylphosphatidylcholine (DOPC), dipalmitoylphosphatidylcholine (DPPC), dioleoylphosphatidylglycerol (DOPG), dipalmitoylphosphatidylglycerol (DPPG), dioleoyl-phosphatidylethanolamine (DOPE), palmitoyloleoylphosphatidylcholine (POPC), palmitoyloleoyl-phosphatidylethanolamine (POPE) and dioleoyl-phosphatidylethanolamine 4-(N-maleimidomethyl)-cyclohexane-1 carboxylate (DOPE-mal), dipalmitoyl phosphatidyl ethanolamine (DPPE), dimyristoylphosphoethanolamine (DMPE), distearoyl-phosphatidylethanolamine (DSPE), 16-O-monomethyl PE, 16-O-dimethyl PE, 18-1-trans PE, 1-stearioyl-2-oleoylphosphatidyethanol amine (SOPE), or 1,2-dielaidoyl-sn-glycero-3-phophoethanolamine (transDOPE).

24. The composition of claim 20, wherein the steroid or steroid analog is cholesterol.

25. A method of inducing an immune response against VZV in a subject, comprising administering to the subject an effective amount of the RNA molecule of claim 1.

26. A method of preventing, treating or ameliorating an infection, disease or condition associated with VZV in a subject, comprising administering to a subject an effective amount of the RNA molecule of claim 1.

27. The method of claim 26, wherein the infection, disease or condition is herpes zoster (shingles) or postherpetic neuralgia.

28. The method of claim 25, wherein the subject is less than about 1 year of age, about 1 year of age or older, about 5 years of age or older, about 10 years of age or older, about 20 years of age or older, about 30 years of age or older, about 40 years of age or older, about 50 years of age or older, about 60 years of age or older, about 70 years of age or older, or older.

29. The method of claim 25, wherein the RNA molecule is administered as a vaccine.

30. The method of claim 25, wherein the subject is administered a single dose, two doses, three doses or more, and optionally, a booster dose of the RNA molecule.

31. A method of inducing an immune response against VZV in a subject, comprising administering to the subject an effective amount of the composition of claim 19.

32. A method of preventing, treating or ameliorating an infection, disease or condition associated with VZV in a subject, comprising administering to a subject an effective amount of the composition of claim 19.
